(19) United States
(12) Patent Application Publication
(10) Pub. No.: US 2024/0026369 A1
(43) Pub. Date: Jan. 25, 2024

(54) USE OF ENHANCED POL THETA ACTIVITY FOR EUKARYOTIC GENOME ENGINEERING

(71) Applicant: KWS SAAT SE & Co. KGaA, Einbeck (DE)

(72) Inventor: Behailu AKLILU, Creve Coeur, MO (US)

(73) Assignee: KWS SAAT SE & Co. KGaA, Einbeck (DE)

(21) Appl. No.: 18/033,576

(22) PCT Filed: Oct. 26, 2021
(86) PCT No.: PCT/EP2021/079678

§ 371 Date: Apr. 25, 2023

Related U.S. Application Data
(60) Provisional application No. 63/106,104, filed on Oct. 27, 2020.

(51) Int. Cl. C12N 15/82; C12N 9/12; C12N 9/22

(52) U.S. Cl. CPC C12N 15/8213; C12N 9/1252; C12N 9/22; C12N 15/8218; C12N 2310/20

(57) ABSTRACT

The present invention generally relates to the technical field of targeted modification of a nucleotide sequence of interest in the genome of a plant by means of a site-specific nuclease, wherein the modification and precision is assisted by specifically enhancing DNA polymerase theta (Pol θ) activity to improve genome editing (GE) efficiencies, preferably for increasing targeted insertion of a DNA insert. The invention describes a method for increasing the efficiency of targeted transgene insertion in a plant or a plant cell. Further provided are methods to modulate endogenous repair pathways with the aim to favor Pol θ activity in the context of GE. Further disclosed are suitable sequences and GE tools suitable in the methods of the invention as well as cells, tissues, organs or materials obtainable by the methods. Finally, an expression construct assembly for conducting the methods of the invention is disclosed.

### TECHNICAL FIELD

[0001] The present invention generally relates to the technical field of targeted modification of a nucleotide sequence of interest in the genome of a plant by means of a site-specific nuclease, wherein the modification and precision is assisted by specifically enhancing DNA polymerase theta (Pol θ) activity to improve genome editing (GE) efficiencies, preferably for increasing targeted insertion of a DNA insert. The invention describes a method for increasing the efficiency of targeted transgene insertion in a plant or a plant cell. Further provided are methods to modulate endogenous repair pathways with the aim to favor Pol θ activity in the context of GE. Further disclosed are suitable sequences and GE tools suitable in the methods of the invention as well as cells, tissues, organs or materials obtainable by the methods. Finally, an expression construct assembly for conducting the methods of the invention is disclosed.

### BACKGROUND OF THE INVENTION

[0002] Meanwhile, the use of CRISPR-based genome editing (GE) is already described for various crop plants. Still, the efficiency of targeted transgene insertion is usually very poor (0.0-10%, Mao et al., National Science Review, Volume 6, Issue 3, May 2019, Pages 421-437, https://doi.org/10.1093/nsr/nwz005).

[0003] Most genome editing techniques rely on the introduction of targeted double strand breaks (DSB) by means of a site-specific nuclease, for example, a CRISPR system. The DSBs stimulate different cellular DNA repair pathways such as homology dependent repair (HDR, also often referred to as homologous recombination (HR)), non-homologous end-joining (NHEJ), and microhomology- or homology-mediated end-joining (MMEJ/HMEJ, see Yao et al., Cell Research, 27, 801-814 (2017)) resulting in targeted modifications (FIG. 1).

[0004] However, efficiency of targeted insertion remains largely poor (0.0-10%) calling for efforts to improve the performance of repair pathways for enhanced DNA knock-in capability.

[0005] NHEJ, a repair strategy not relying on any homologous regions, mostly causes random base pair insertions or deletions (InDels) that can lead to gene knockouts by disruption. In rarer cases, NHEJ repair mechanisms can also lead to the targeted introduction of a donor template if the repair template (RT) has fitting ends (blunt or sticky ends) that allow integration of the donor DNA.

[0006] HDR-based repair of the DSB can occur if a repair template is present that has matching regions to the target sequence (homologous arms) framing the sequence to be edited or inserted. Such HDR-based methods can create very precise insertions or base pair substitutions at the target site. This includes targeted insertion of larger nucleotide molecules, e.g. entire genes, or regulatory elements or the replacement of one allele for another, which for example carries exchange of one or more individual amino acid substitutions. The typical length of HDR-based repair homology arms is 50-1,000 nt (Yu et al, 2020: An efficient gene knock-in strategy using 5′-modified dsDNA donors with short homology arms; Li et al., 2019: Design and specificity of long ssDNA donors for CRISPR-based knock-in).

[0007] MMEJ and HMEJ pathways are both mediated by the DNA polymerase theta (Pol θ). Pol θ is a highly conserved, error prone, A-family DNA polymerase encoded by the PoIQ gene in multicellular eukaryotic organisms including plants (Yousefzadeh and Wood, DNA Repair, 12, 1-9, 2013; Sharief et al., Genomics, 59, 90-96, 1999). It contains an N-terminal helicase and a C-terminal polymerase domain connected by a long lesser conserved flexible region (Black et al., Molecular basis of microhomology-mediated end-joining by purified full-length Pol ⊖, Nature Communications, 10:4423, 2019). Pol θ plays role in DNA repair and genome integrity such as DNA interstrand crosslink and base excision repair (Pillaire et al., Oncogene (2010), 29, 876-887).

[0008] Most importantly, Pol θ is the main enzyme for a DSB repair pathway known by several names including “microhomology mediated end-joining (MMEJ)”, “alternative end-joining” (altEJ), and “polymerase theta-mediated end joining (TMEJ)” (Black et al., 2019, supra).

[0009] DNA polymerase theta (Polymerase theta, Pol theta, Pol Theta, or Pol θ herein with reference to the protein/enzyme), encoded by the POLQ gene (also PoIQ or Pol Q herein with reference to the DNA sequence) (e.g., for plants see: van Kregten et al., 2016, T-DNA integration in plants results from polymerase-θ-mediated DNA repair. Nature Plants 2, Article number: 16164), is a crucial enzyme involved in DNA repair in eukaryotic cells of various kingdoms.

[0010] Polymerase e was formerly considered a NHEJ component but has recently been implicated in microhomology-mediated end joining (MMEJ) processes, which are associated with insertions at the beak side (Sfeir and Symington, Trends in Biochemical Sciences, 40 (11), 701-714 (2015)).

[0011] DNA polymerase e in mammals is an a typical A-family type polymerase with an N-terminal helicase-like domain, a large central domain harboring a Rad51 interaction motif, and a C-terminal polymerase domain capable of extending DNA strands from mismatched or even unmatched termini. DNA molecules can be randomly incorporated into eukaryotic genomes through the action of Pol θ being a low fidelity polymerase (Hogg et al., 2012. Promiscuous DNA synthesis by human DNA polymerase e. Nucleic Acids Research, Volume 40, Issue 6, 1 Mar. 2012, Pages 2611-2622) that is required for random integration of T-DNAs in plants. Knockout mutant plants lacking Pol θ activity are incapable of integrating T-DNA molecules during Agrobacterium tumefaciens mediated plant transformation (van Kregten et al., 2016, supra). In vitro experiments identified an evolutionarily conserved loop in the polymerase domain that is essential for synapsing DNA ends during end joining to protect the genome against gross chromosomal rearrangements (Sfeir, The FASEB Journal, vol. 30, no. 1, 2016).

[0012] For MMEJ to occur in the natural cellular environment, two DSB ends have to be joined by Pol θ activity and these ends need to have homologous sequences that roughly range between 3 25 bp (Yanik et al., 2018; Sharma et al., 2015). The end ligation process starts with the resection of the 5′—strand ends to expose 3′—complementary single-stranded (ssDNA) homologous sequences or overhangs. The micro-homologous regions would then anneal followed by fill-in synthesis, ligation, and removal of heterologous flaps (Sfeir and Symington, 2015, supra). A report has also described activities of Pol θ on longer homology sequences (up to 1,600 nt) for the integration of transgenes in target DNA locus sites and named the mechanism “Homology-Mediated End joining (HMEJ)” (Yao et al., Cell Research, 2017, 27:801-814).

[0013] Meanwhile, several proteins were identified all of which are involved in the Pol θ mediated MMEJ repair pathway. In mammals, end resection is carried out by Mre11 and CtIP proteins (Truong et al., PNAS, 2013, vol. 110, no. 19). PARP1 is suggested to play the role of annealing microhomologies via complementary base pairing (Sfeir and Symington, 2015, supra).

[0014] Alternatively, Pol θ is proposed to anneal and tether broken DNA ends or stabilize annealed intermediates (Newman et al., 2015, Structure (12):2319-2330, doi: 10.1016/j.str.2015.10.014). Pol θ may also facilitate the displacement of ssDNA binding proteins such as RPA from the 3′-ssDNA overhangs. In addition, Pol θ is required for fill-in synthesis of ssDNA flanking the annealed microhomologies (Sfeir and Symington, 2015, supra). Finally, removal of heterologous flaps and sealing of ends is carried out by ERCC1/XPF and LIGASE3, respectively (Bennardo et al., 2008, PLoS Genetics, vol. 4, issue 6, el 000110; Simsek et al., 2011, PLoS Genetics, vol. 7, issue 6, e1002080).

[0015] Pol θ was also described to play a major role in the random integration of T-DNA into a plants' genome in its natural environment cellular (Kregten et al, 2016, supra), which findings explained the T-DNA insertion in a plant cell used in plant biotech applications since decades. No GE experiments were conducted though in Kregten et al, 2016, supra. In addition, Pol θ was disclosed as the primary facilitator of random integration of exogenous DNA in mammalian cells (Zelensky et al., 2017, Nature Communications, 8:66, PLoS Genetics, vol. 8, issue 2, e1002534), and retrohoming of linear group II introns (retrotransposons) in eukaryotes (White & Lambowitz, 2012).

[0016] Notably, Zelensky et al., 2017, supra, obtained the relevant results by Pol θ inactivation to decrease off-target random integration in a GE setting by hampering or abolishing Pol θ activity, which strategy aims at increasing HR targeting efficiencies. Interestingly, all groups and authors having worked with Pol θ in the context of GE exclusively tried to inactivate Pol θ and/or to abolish Pol θ activity in a cell to optimize GE outcomes as it was assumed that Pol θ activity may deteriorate targeted GE outcomes.

[0017] Although many efforts have been made to increase targeted and precise HDR-mediated gene editing to outcompete the more prevalent but error-prone NHEJ pathway, still at date little is known about increasing Pol θ-mediated repair pathways (MMEJ/NHEJ) to thereby increase targeted transgene insertion.

[0018] The present invention now surprisingly found that Pol θ activation can be exploited to significantly improve the outcome of GE for obtaining reliable targeted insertions and random insertions at a genomic target site of interest. This use of Pol θ as elucidated herein thus goes into the opposite direction of attempts disclosed in the prior art aiming at reducing or even abolishing Pol θ activity in a cell of interest during GE is conducted on this cell, particularly in plant cells.

[0019] It was thus an object of the present invention to optimize genome editing strategies in eukaryotic cells, preferably in plant cells, by increasing targeted or random insertion events by influencing cellular repair pathways in a manner favouring GE efficiency (rate of successful events) and specificity.

### SUMMARY OF THE INVENTION

[0020] The above objects were solved by technically exploiting the surprising finding that the activation, not the inhibition, of Pol θ in a cell of interest to be edited via GE can significantly enhance GE efficiency by providing new methods and molecular tools, and a combination thereof, specifically promoting Pol θ activity during GE.

[0021] In a first aspect, there is thus provided a method for targeted genome modification in a eukaryotic cell, preferably for increasing targeted insertion of a DNA insert at at least one target genomic sequence in a eukaryotic cell, comprising or consisting of the steps: a) providing at least one eukaryotic cell to be modified; b) promoting DNA polymerase theta (Pol θ) activity in said cell, wherein the promotion of Pol θ activity increases the DNA insertion efficiency during genome modification; c) introducing into the at least one eukaryotic cell (i) at least one genome modification system, preferably a genome editing system comprising at least one site-directed nuclease, nickase or an inactivated nuclease, preferably a nucleic acid guided nuclease, nickase or an inactivated nuclease, or a sequence encoding the same, and optionally at least one guide molecule, or a sequence encoding the same and (ii) at least one single-stranded or double-stranded DNA insert, or a sequence encoding the same; d) cultivating the at least one eukaryotic cell under conditions allowing (i) the promotion of DNA polymerase Pol θ (Pol θ) activity; and (ii) the activity of the at least one genome editing system and the at least one DNA insert and optionally the at least one guide molecule; and e) obtaining at least one modified cell comprising the sequence of the DNA insert integrated at or close to the target genomic site; and f) optionally: obtaining a eukaryotic organism, plant tissue, organ or seed regenerated from the at least one modified cell.

[0022] In one embodiment, the promoting of Pol θ is performed by enhancing the cellular level of polymerase Pol θ.

[0023] In a further embodiment of the above method, the DNA polymerase Pol θ sequence, or the POLQ sequence encoding the same, is selected from the group consisting of SEQ ID NO: 1 to SEQ ID NO: 26, or a sequence, including a functional domain, having at least at least 70%, 71%, 72%, 73%, 74%, 75%, 76%, 77%, 78%, 79%, 80%, 81%, 82%, 83%, 84%, 85%, 86%, 87%, 88%, 89%, 90%, 91%, 92%, 93%, 94%, 95%, 96%, 97%, 98% or 99% sequence identity thereto.

[0024] In yet a further embodiment of the above method, the activity of DNA polymerase Pol θ is further promoted by modulating, preferably silencing, components of at least one competing DNA repair pathway, wherein the component belongs to the NHEJ or HDR repair pathway, or the sequence encoding the same, is selected from the group consisting of SEQ ID NO: 27 to SEQ ID NO: 114, or a sequence having at least at least 70%, 71%, 72%, 73%, 74%, 75%, 76%, 77%, 78%, 79%, 80%, 81%, 82%, 83%, 84%, 85%, 86%, 87%, 88%, 89%, 90%, 91%, 92%, 93%, 94%, 95%, 96%, 97%, 98% or 99% sequence identity thereto.

[0025] In another embodiment of the above method, promotion of the MMEJ/HMEJ pathway is further achieved by co-expressing and/or modulating Pol θ and at least one MRE11 and/or at least one PARP1 protein, wherein the MRE11 and/or PARP1 protein, or the sequence encoding the same, is selected from the group consisting of SEQ ID NO: 115 to SEQ ID NO: 162 or a sequence having at least at least 70%, 71%, 72%, 73%, 74%, 75%, 76%, 77%, 78%, 79%, 80%, 81%, 82%, 83%, 84%, 85%, 86%, 87%, 88%, 89%, 90%, 91%, 92%, 93%, 94%, 95%, 96%, 97%, 98% or 99% sequence identity thereto.

[0026] In yet a further embodiment of the above method, the at least one site-directed nuclease, nickase or inactivated nuclease, or a sequence encoding the same, is selected from the group consisting of a CRISPR/Cas system, preferably from a CRISPR/Cas12a or a CRISPR/Cas12b system, including a CRISPR/MAD7 system, a CRISPR/Cfp1 system, or a CRISPR/MAD2 system, from a CRISPR/Cas9 system, a CRISPR/CasX system, a CRISPR/CasY system, a CRISPR/Cas13 system, or a CRISPR/Csm system, a zinc finger nuclease system, a transcription activator-like nuclease system, or a meganuclease system, or any combination, variant, or catalytically active fragment thereof.

[0027] In another embodiment of the method according the first aspect, the Pol θ activity promotes targeted genome modification by acting on an endogenous micro-homology mediated end joining (MMEJ) and/or a homology-mediated end-joining (HMEJ) pathway.

[0028] In yet another embodiment of the method according the first aspect, the eukaryotic cell is a plant cell and wherein the method additionally comprises a step g) of screening for at least one plant tissue, organ, plant or seed regenerated from the at least or modified cell in the TO and/or T1 generation carrying the DNA insert.

[0029] In another embodiment of the method according the first aspect, the at least one eukaryotic cell is selected from a plant cell, or a mammalian cell, or the at least one eukaryotic cell is a plant cell, preferably wherein the plant cell is a plant cell selected from the group consisting of Hordeum, Sorghum, Saccharum, Zea, Setaria, Oryza, Triticum, Secale, Triticale, Malus, Brachypodium, Aegilops, Daucus, Beta, Eucalyptus, Nicotiana, Solanum, Coffea, Vitis, Erythrante, Genlisea, Cucumis, Marus, Arabidopsis, Crucihimalaya, Cardamine, Lepidium, Capsella, Olmarabidopsis, Arabis, Brassica, Eruca, Raphanus, Citrus, Jatropha, Populus, Medicago, Cicer, Cajanus, Phaseolus, Glycine, Gossypium, Astragalus, Lotus, Torenia, Allium, Spinacia or Helianthus, preferably, the plant or plant cell originates from a species selected from the group consisting of Hordeum vulgare, Hordeum bulbusom, Sorghum bicolor, Saccharum officinarium, Zea spp., including Zea mays, Setaria italica, Oryza minuta, Oryza sativa, Oryza australiensis, Oryza alta, Triticum aestivum, Triticum durum, Secale cereale, Triticale, Malus domestica, Brachypodium distachyon, Hordeum marinum, Aegilops tauschii, Daucus glochidiatus, Beta spp., including Beta vulgaris, Daucus pusillus, Daucus muricatus, Daucus carota, Eucalyptus grandis, Nicotiana sylvestris, Nicotiana tomentosiformis, Nicotiana tabacum, Nicotiana benthamiana, Solanum lycopersicum, Solanum tuberosum, Coffea canephora, Vitis vinifera, Erythrante guttata, Genlisea aurea, Cucumis sativus, Marus notabilis, Arabidopsis arenosa, Arabidopsis lyrata, Arabidopsis thaliana, Crucihimalaya himalaica, Crucihimalaya wallichii, Cardamine nexuosa, Lepidium virginicum, Capsella bursa pastoris, Olmarabidopsis pumila, Arabis hirsute, Brassica napus, Brassica oleracea, Brassica rapa, Raphanus sativus, Brassica juncacea, Brassica nigra, Eruca vesicaria subsp. sativa, Citrus sinensis, Jatropha curcas, Populus trichocarpa, Medicago truncatula, Cicer yamashitae, Cicer bijugum, Cicer arietinum, Cicer reticulatum, Cicer judaicum, Cajanus cajanifolius, Cajanus scarabaeoides, Phaseolus vulgaris, Glycine max, Gossypium sp., Astragalus sinicus, Lotus japonicas, Torenia fournieri, Allium cepa, Allium fistulosum, Allium sativum, Allium tuberosum, Helianthus annuus, Helianthus tuberosus and/or Spinacia oleracea.

[0030] In a further embodiment of the methods of the first aspect, the method additionally comprises the step of introducing or applying at least one regeneration booster, or a sequence encoding the same, or a regeneration booster chemical, preferably wherein the regeneration booster is selected from the group consisting of BBM, WUS, WOX, RKD4, RKD2, GRF, LEC, or a variant thereof, or a sequence encoding the same and/or wherein the regeneration booster comprises at least one of an RBP and/or at least one PLT, preferably wherein the regeneration booster comprises at least one of an RBP, wherein the at least one regeneration booster sequence is individually selected from any one of SEQ ID NOs: 171, 195 to 201, and 209 to 211 or a sequence having at least 80%, 81%, 82%, 83%, 84%, 85%, 86%, 87%, 88%, 89%, 90%, 91%, 92%, 93%, 94%, 95%, 96%, 97%, 98% or 99% sequence identity thereto, or an active fragment thereof, or wherein the at least one regeneration booster sequence is encoded by a sequence individually selected from any one of SEQ ID NO: 172, 202 to 208, and 212 to 214 or a sequence having at least 70%, 71%, 72%, 73%, 74%, 75%, 76%, 77%, 78%, 79%, 80%, 81%, 82%, 83%, 84%, 85%, 86%, 87%, 88%, 89%, 90%, 91%, 92%, 93%, 94%, 95%, 96%, 97%, 98% or 99% sequence identity thereto and/or wherein at least one first RBP or PLT, or a sequence encoding the same, preferably at least one RBP, most preferably RBP2, or the sequence encoding the same, is provided and wherein at least one further the regeneration booster is provided selected from: (i) at least one further RBP and/or PLT, or the sequence encoding the same, or a variant thereof, (ii) at least one BBM, or the sequence encoding the same, or a variant thereof, (iii) at least one WOX, including WUS1, WUS2, or WOX5, or the sequence encoding the same, or a variant thereof, (iv) at least one RKD4 or RKD2, including wheat RKD4, or the sequence encoding the same, or a variant thereof, (v) at least one GRF, including Zea mays GRF5 and Zea mays GRF1/TOW, or the sequence encoding the same, or a variant thereof, and/or (vi) at least one LEC sequence, including LEC1 and LEC2, or the sequence encoding the same, or a variant thereof, and wherein the at least one second regeneration booster, or a sequence encoding the same, is different to the first regeneration booster.

[0031] In a second aspect, there is provided a genetically modified cell, tissue, organ or material, including a seed, obtainable by a method according to the first aspect.

[0032] In one embodiment of the second aspect, the genetically modified cell, tissue, organ or material, including a seed, is a plant cell, tissue, organ or material, including a seed.

[0033] In a third aspect, there is provided an expression construct assembly, comprising: (i) at least one vector encoding at least one Pol Q sequence as defined above, and optionally comprising a construct encoding silencing components of at least one MMEJ/HMEJ competing repair pathway as defined above, and optionally a protein promoting MMEJ/HMEJ pathway as defined above; and (ii) at least one vector encoding a gene encoding at least one genome editing system, preferably wherein the genome editing system is as defined above, optionally comprising at least one vector encoding at least one guide molecule as defined in claim 1; and (iii) at least one vector encoding at least one DNA insert, or at least one single-stranded or double-stranded DNA insert as defined above; and (iv) optionally: at least one vector encoding at least one regeneration booster, preferably wherein the regeneration booster is as defined above; wherein (i), (ii), (iii), and/or (iv) are encoded on the same, or on different vectors.

[0034] In one embodiment of the third aspect, the at least one vector of the assembly further comprises a nucleic acid sequence encoding at least one marker.

[0035] In one embodiment of the third aspect, the expression construct assembly comprises at least one construct or sequence individually selected from any one of SEQ ID NOs: 163 to 165, 170, 173 to 175, and 179 to 183, 185, 187 and 189.

[0036] In yet other aspect, the methods as disclosed herein may be used in a therapeutic sense to use the surprising effect that Pol θ activity is associated with an increased GE efficiency if the competing endogenous DNA repair pathways are modified in a concerted way, to achieve at least one targeted genome modification in a eukaryotic cell, preferably a mammalian cell or a human cell, to modify a at least one mutation associated with a disease, wherein the method does not involve a method for treatment of the human or animal body by surgery or therapy and/or a diagnostic method practised on the human or animal body and/or wherein the method does not involve processes for cloning human beings, processes for modifying the germ line genetic identity of human beings, uses of human embryos for industrial or commercial purposes and/or processes for modifying the genetic identity of animals which are likely to cause them suffering without any substantial medical benefit to man or animal, and also animals resulting from such processes.

[0037] Further uses of and methods for constructing multiple purpose expression constructs and expression cassettes for use according to the present invention are provided.

### BRIEF DESCRIPTION OF DRAWINGS

[0038] FIG. 1 shows the major repair pathways as of relevance during gene editing and subsequent repair. Most genome editing techniques rely on the introduction of targeted double strand breaks (DSBs) by means of a site-specific nuclease, for example of the CRISPR system. The DSBs stimulate different cellular DNA repair pathways such as homology dependent repair (HDR, also often referred to as homologous recombination (HR)), non-homologous end-joining (NHEJ), or the Pol θ-mediated microhomology- or homology-mediated end-joining (MMEJ/HMEJ) resulting in targeted modifications. MMEJ is also often referred to as polymerase theta (Pol θ) mediated end-joining (TMEJ) or alternative end-joining (altEJ).

[0039] FIG. 2 shows % homology levels among Pol θ proteins based on their amino acid sequences (SEQ ID NOs 2, 4, 6, 8, 10, 12, 14, 16, 18, 20, 22, 24, 26). It should be noted that this comparison does not consider similarities between amino acid properties (e.g. charged, aromatic, hydrophobic). This percent identity matrix was created using clustal omega (htps://www.ebi ac.uk/Tools/nsa/clustalo/).

[0040] FIG. 3 shows a phylogenetic tree based on the Pol θ amino acid sequences. This tree was generated using the CLC Main Workbench 8.0.

[0041] FIG. 4 shows the exemplary DNA insert design for (A) MMEJ-mediated transgene insertion, and (B) HMEJ-mediated transgene insertion.

[0042] FIG. 5 shows the more detailed structure of the specific DNA insert used. *Plasmid seq is part of the plasmid backbone sequence included in the transgene as a result of an effort to pick good reverse primer for PCR amplification of the transgene.

[0043] FIG. 6 shows the sequence of the Zea mays Cell Wall Invertase (ZmCWI2) promoter (and portion of exon and intron) and the target cleavage sites. PAM sites are underlined, gRNA targets are boxed. The first exon is shaded in grey and the first intron in lower case. Cleavage occurs between the 18th and the 19th nucleotide (counting from the PAM site) of the gRNA sequence.

[0044] FIG. 7 shows a cartoon depicting the Zea mays Cell Wall Invertase (ZmCWI2) promoter (and portion of exon and intron) and target cleavage sites.

### BRIEF DESCRIPTION OF SEQUENCES

| SEQ ID NO. | Description |
|---|---|
| 1 | POLQ Beta Vulgaris (Sugar beet) cDNA sequence |
| 2 | Pol theta Beta Vulgaris (Sugar beet) amino acid sequence |
| 3 | POLQ Zea mays (corn) cDNA sequence |
| 4 | Pol theta Zea mays (corn) amino acid sequence |
| 5 | POLQ Brassica napus (Rapeseed or Oilseed rape) cDNA sequence |
| 6 | Pol theta Brassica napus (Rapeseed or Oilseed rape) amino acid sequence |
| 7 | POLQ Helianthus annus (Sunflower) cDNA sequence |
| 8 | Pol theta Helianthus annus (Sunflower) amino acid sequence |
| 9 | POLQ Hordeum vulgare (Barely) cDNA sequence |
| 10 | Pol theta Hordeum vulgare (Barely) amino acid sequence |
| 11 | POLQ Triticum aestivum (Wheat) cDNA sequence |
| 12 | Pol theta Triticum aestivum (Wheat) amino acid sequence |
| 13 | POLQ Secale cereale (Rye) cDNA sequence |
| 14 | Pol theta Secale cereale (Rye) amino acid sequence |
| 15 | POLQ Oryza Sativa (rice) cDNA sequence |
| 16 | Pol theta Oryza Sativa (rice) amino acid sequence |
| 17 | POLQ Glycine max (Soybean) cDNA sequence |
| 18 | Pol theta Glycine max (Soybean) amino acid sequence |
| 19 | POLQ Solanum tuberosum (Potato) cDNA sequence |
| 20 | Pol theta Solanum tuberosum (Potato) amino acid sequence |
| 21 | POLQ Solanum lycopersicum (Tomato) cDNA sequence |
| 22 | Pol theta Solanum lycopersicum (Tomato) amino acid sequence |
| 23 | POLQ Sorghum bicolor (Sorghum) cDNA sequence |
| 24 | Pol theta Sorghum bicolor (Sorghum) amino acid sequence |
| 25 | POLQ Homo sapiens (human) cDNA sequence |
| 26 | Pol theta Homo sapiens (human) amino acid sequence |
| 27 | RPA70C Beta Vulgaris (Sugar beet) cDNA sequence |
| 28 | RPA70C Beta Vulgaris (Sugar beet) amino acid sequence |
| 29 | RPA70C Zea mays (corn) cDNA sequence |
| 30 | RPA70C Zea mays (corn) amino acid sequence |
| 31 | RPA70C Brassica napus (Rapeseed or Oilseed rape) cDNA sequence |
| 32 | RPA70C Brassica napus (Rapeseed or Oilseed rape) amino acid sequence |
| 33 | RPA70C Helianthus annus (Sunflower) cDNA sequence |
| 34 | RPA70C Helianthus annus (Sunflower) amino acid sequence |
| 35 | RPA70C Hordeum vulgare (Barely) cDNA sequence |
| 36 | RPA70C Hordeum vulgare (Barely) amino acid sequence |
| 37 | RPA70C Triticum aestivum (Wheat) cDNA sequence |
| 38 | RPA70C Triticum aestivum (Wheat) amino acid sequence |
| 39 | RPA70C Secale cereale (Rye) cDNA sequence |
| 40 | RPA70C Secale cereale (Rye) amino acid sequence |
| 41 | RPA70C Oryza Sativa (rice) cDNA sequence |
| 42 | RPA70C Oryza Sativa (rice) amino acid sequence |
| 43 | RPA70C Glycine max (Soybean) cDNA sequence |
| 44 | RPA70C Glycine max (Soybean) amino acid sequence |
| 45 | RPA70C Solanum tuberosum (Potato) cDNA sequence |
| 46 | RPA70C Solanum tuberosum (Potato) amino acid sequence |
| 47 | RPA70C Solanum lycopersicum (Tomato) cDNA sequence |
| 48 | RPA70C Solanum lycopersicum (Tomato) amino acid sequence |
| 49 | RPA70C Sorghum bicolor (Sorghum) cDNA sequence |
| 50 | RPA70C Sorghum bicolor (Sorghum) amino acid sequence |
| 51 | DNA ligase 4 Beta Vulgaris (Sugar beet) cDNA sequence |
| 52 | DNA ligase 4 Beta Vulgaris (Sugar beet) amino acid sequence |
| 53 | DNA ligase 4 Zea mays (corn) cDNA sequence |
| 54 | DNA ligase 4 Zea mays (corn) amino acid sequence |
| 55 | DNA ligase 4 Brassica napus (Rapeseed or Oilseed rape) cDNA sequence |
| 56 | DNA ligase 4 Brassica napus (Rapeseed or Oilseed rape) amino acid sequence |
| 57 | DNA ligase 4 Helianthus annus (Sunflower) cDNA sequence |
| 58 | DNA ligase 4 Helianthus annus (Sunflower) amino acid sequence |
| 59 | DNA ligase 4 Hordeum vulgare (Barely) cDNA sequence |
| 60 | DNA ligase 4 Hordeum vulgare (Barely) amino acid sequence |
| 61 | DNA ligase 4 Secale cereale (Rye) cDNA sequence |
| 62 | DNA ligase 4 Secale cereale (Rye) amino acid sequence |
| 63 | DNA ligase 4 Oryza Sativa (rice) cDNA sequence |
| 64 | DNA ligase 4 Oryza Sativa (rice) amino acid sequence |
| 65 | DNA ligase 4 Glycine max (Soybean) cDNA sequence |
| 66 | DNA ligase 4 Glycine max (Soybean) amino acid sequence |
| 67 | DNA ligase 4 Solanum tuberosum (Potato) cDNA sequence |
| 68 | DNA ligase 4 Solanum tuberosum (Potato) amino acid sequence |
| 69 | DNA ligase 4 Solanum lycopersicum (Tomato) cDNA sequence |
| 70 | DNA ligase 4 Solanum lycopersicum (Tomato) amino acid sequence |
| 71 | DNA ligase 4 Sorghum bicolor (Sorghum) cDNA sequence |
| 72 | DNA ligase 4 Sorghum bicolor (Sorghum) amino acid sequence |
| 73 | KU70 Beta Vulgaris (Sugar beet) cDNA sequence |
| 74 | KU70 Beta Vulgaris (Sugar beet) amino acid sequence |
| 75 | KU70 Zea mays (corn) cDNA sequence |
| 76 | KU70 Zea mays (corn) amino acid sequence |
| 77 | KU70 Brassica napus (Rapeseed or Oilseed rape) cDNA sequence |
| 78 | KU70 Brassica napus (Rapeseed or Oilseed rape) amino acid sequence |
| 79 | KU70 Hordeum vulgare (Barely) cDNA sequence |
| 80 | KU70 Hordeum vulgare (Barely) amino acid sequence |
| 81 | KU70 Triticum aestivum (Wheat) cDNA sequence |
| 82 | KU70 Triticum aestivum (Wheat) amino acid sequence |
| 83 | KU70 Oryza Sativa (rice) cDNA sequence |
| 84 | KU70 Oryza Sativa (rice) amino acid sequence |
| 85 | KU70 Glycine max (Soybean) cDNA sequence |
| 86 | KU70 Glycine max (Soybean) amino acid sequence |
| 87 | KU70 Solanum tuberosum (Potato) cDNA sequence |
| 88 | KU70 Solanum tuberosum (Potato) amino acid sequence |
| 89 | KU70 Solanum lycopersicum (Tomato) cDNA sequence |
| 90 | KU70 Solanum lycopersicum (Tomato) amino acid sequence |
| 91 | KU70 Sorghum bicolor (Sorghum) cDNA sequence |
| 92 | KU70 Sorghum bicolor (Sorghum) amino acid sequence |
| 93 | KU80 Beta Vulgaris (Sugar beet) cDNA sequence |
| 94 | KU80 Beta Vulgaris (Sugar beet) amino acid sequence |
| 95 | KU80 Zea mays (corn) cDNA sequence |
| 96 | KU80 Zea mays (corn) amino acid sequence |
| 97 | KU80 Brassica napus (Rapeseed or Oilseed rape) cDNA sequence |
| 98 | KU80 Brassica napus (Rapeseed or Oilseed rape) amino acid sequence |
| 99 | KU80 Helianthus annus (Sunflower) cDNA sequence |
| 100 | KU80 Helianthus annus (Sunflower) amino acid sequence |
| 101 | KU80 Hordeum vulgare (Barely) cDNA sequence |
| 102 | KU80 Hordeum vulgare (Barely) amino acid sequence |
| 103 | KU80 Triticum aestivum (Wheat) cDNA sequence |
| 104 | KU80 Triticum aestivum (Wheat) amino acid sequence |
| 105 | KU80 Oryza Sativa (rice) cDNA sequence |
| 106 | KU80 Oryza Sativa (rice) amino acid sequence |
| 107 | KU80 Glycine max (Soybean) cDNA sequence |
| 108 | KU80 Glycine max (Soybean) amino acid sequence |
| 109 | KU80 Solanum tuberosum (Potato) cDNA sequence |
| 110 | KU80 Solanum tuberosum (Potato) amino acid sequence |
| 111 | KU80 Solanum lycopersicum (Tomato) cDNA sequence |
| 112 | KU80 Solanum lycopersicum (Tomato) amino acid sequence |
| 113 | KU80 Sorghum bicolor (Sorghum) cDNA sequence |
| 114 | KU80 Sorghum bicolor (Sorghum) amino acid sequence |
| 115 | MRE11 Beta Vulgaris (Sugar beet) cDNA sequence |
| 116 | MRE11 Beta Vulgaris (Sugar beet) amino acid sequence |
| 117 | MRE11 Zea mays (corn) cDNA sequence |
| 118 | MRE11 Zea mays (corn) amino acid sequence |
| 119 | MRE11 Brassica napus (Rapeseed or Oilseed rape) cDNA sequence |
| 120 | MRE11 Brassica napus (Rapeseed or Oilseed rape) amino acid sequence |
| 121 | MRE11 Helianthus annus (Sunflower) cDNA sequence |
| 122 | MRE11 Helianthus annus (Sunflower) amino acid sequence |
| 123 | MRE11 Hordeum vulgare (Barely) cDNA sequence |
| 124 | MRE11 Hordeum vulgare (Barely) amino acid sequence |
| 125 | MRE11 Triticum aestivum (Wheat) cDNA sequence |
| 126 | MRE11 Triticum aestivum (Wheat) amino acid sequence |
| 127 | MRE11 Secale cereale (Rye) cDNA sequence |
| 128 | MRE11 Secale cereale (Rye) amino acid sequence |
| 129 | MRE11 Oryza Sativa (rice) cDNA sequence |
| 130 | MRE11 Oryza Sativa (rice) amino acid sequence |
| 131 | MRE11 Glycine max (Soybean) cDNA sequence |
| 132 | MRE11 Glycine max (Soybean) amino acid sequence |
| 133 | MRE11 Solanum tuberosum (Potato) cDNA sequence |
| 134 | MRE11 Solanum tuberosum (Potato) amino acid sequence |
| 135 | MRE11 Solanum lycopersicum (Tomato) cDNA sequence |
| 136 | MRE11 Solanum lycopersicum (Tomato) amino acid sequence |
| 137 | MRE11 Sorghum bicolor (Sorghum) cDNA sequence |
| 138 | MRE11 Sorghum bicolor (Sorghum) amino acid sequence |
| 139 | PARP1 Beta Vulgaris (Sugar beet) cDNA sequence |
| 140 | PARP1 Beta Vulgaris (Sugar beet) amino acid sequence |
| 141 | PARP1 Zea mays (corn) cDNA sequence |
| 142 | PARP1 Zea mays (corn) amino acid sequence |
| 143 | PARP1 Brassica napus (Rapeseed or Oilseed rape) cDNA sequence |
| 144 | PARP1 Brassica napus (Rapeseed or Oilseed rape) amino acid sequence |
| 145 | PARP1 Helianthus annus (Sunflower) cDNA sequence |
| 146 | PARP1 Helianthus annus (Sunflower) amino acid sequence |
| 147 | PARP1 Hordeum vulgare (Barely) cDNA sequence |
| 148 | PARP1 Hordeum vulgare (Barely) amino acid sequence |
| 149 | PARP1 Triticum aestivum (Wheat) cDNA sequence |
| 150 | PARP1 Triticum aestivum (Wheat) amino acid sequence |
| 151 | PARP1 Secale cereale (Rye) cDNA sequence (partial) |
| 152 | PARP1 Secale cereale (Rye) amino acid sequence (partial) |
| 153 | PARP1 Oryza Sativa (rice) cDNA sequence |
| 154 | PARP1 Oryza Sativa (rice) amino acid sequence |
| 155 | PARP1 Glycine max (Soybean) cDNA sequence |
| 156 | PARP1 Glycine max (Soybean) amino acid sequence |
| 157 | PARP1 Solanum tuberosum (Potato) cDNA sequence |
| 158 | PARP1 Solanum tuberosum (Potato) amino acid sequence |
| 159 | PARP1 Solanum lycopersicum (Tomato) cDNA sequence |
| 160 | PARP1 Solanum lycopersicum (Tomato) amino acid sequence |
| 161 | PARP1 Sorghum bicolor (Sorghum) cDNA sequence |
| 162 | PARP1 Sorghum bicolor (Sorghum) amino acid sequence |
| 163 | A general example of a DNA fragment (ZmUbi) flanked by homology arms |
| | for targeted insertion at ZmCWI2 promoter region. |
| 164 | Transgene (ZmUbi) to be integrated (excl. Homology arms) |
| 165 | Plasmid constructs for the expression of Mad7 and tDTomato (GEMT129) |
| 166 | Mad7 CDS |
| 167 | MAD7 PRT |
| 168 | tdTomato CDS |
| 169 | tdTomato PRT |
| 170 | Plasmid constructs for the expression of RBP2 (GEMT128) |
| 171 | RBP2 CDS |
| 172 | RBP2 PRT |
| 173 | GEMT201, plasmid that encodes gRNA to target CWI2 promoter |
| 174 | GEMT202, plasmid that encodes gRNA to target CWI2 promoter |
| 175 | GEMT248, plasmid that encodes gRNA to target CWI2 promoter |
| 176 | gRNA from GEMT201 |
| 177 | gRNA from GEMT202 |
| 178 | gRNA from GEMT248 |
| 179 | Plasmid construct for the expression of the DNA insert (SEQ ID NO 163) |
| 180 | Plasmid construct expressing ZmPolQ (GMT242) |
| 181 | Plasmid construct GEMT341 expressing ZmPARP1 (SEQ ID NO: 141 |
| | (CDS) and 142 (PRT) |
| 182 | Plasmid construct GEMT340 expressing ZmMre11 (SEQ ID NO: 117 (CDS) |
| | and 118 (PRT) |
| 183 | Plasmid construct GEMT268 expressing a ZmRPA70C silencing construct |
| 184 | ZmRPA70C silencing construct |
| 185 | Plasmid construct GEMT269 expressing a ZmKu70 silencing construct |
| 186 | ZmKu70 silencing construct |
| 187 | Plasmid construct expressing a ZmKu80 silencing construct |
| 188 | ZmKu80 silencing construct |
| 189 | Plasmid construct GEMT270 expressing a ZmLig4 silencing construct |
| 190 | ZmLig4 silencing construct |
| 191 | FIG. 6 |
| 192 | FIG. 6 gRNA 2 |
| 193 | FIG. 6 gRNA 3 |
| 194 | FIG. 6 gRNA 10 |
| 195 | RBP1 CDS |
| 196 | RBP3 CDS |
| 197 | RBP4 CDS |
| 198 | RBP5 CDS |
| 199 | RBP6 CDS |
| 200 | RBP7 CDS |
| 201 | RBP8 CDS |
| 202 | RBP1 protein |
| 203 | RBP3 protein |
| 204 | RBP4 protein |
| 205 | RBP5 protein |
| 206 | RBP6 protein |
| 207 | RBP7 protein |
| 208 | RBP8 protein |
| 209 | ZmPLT3-17207_CDS |
| 210 | ZmPLTS_CDS |
| 211 | ZmPLT7_CDS |
| 212 | PLT3-17207 protein |
| 213 | ZmPLTS protein |
| 214 | ZmPLT7 protein |

### Definitions

[0046] Unless defined otherwise, technical and scientific terms used herein have the same meaning as commonly understood by one of ordinary skill in the art to which this invention belongs.

[0047] As used in the context of the present application, the term “about” means+/−10% of the recited value, preferably +/−5% of the recited value. For example, about 100 nucleotides (nt) shall be understood as a value between 90 and 110 nt, preferably between 95 and 105 nt.

[0048] A “base editor” as used herein refers to a protein or a fragment thereof having the same catalytic activity as the protein it is derived from, which protein or fragment thereof, alone or when provided as molecular complex, referred to as base editing complex herein, has the capacity to mediate a targeted base modification, i.e., the conversion of a base of interest resulting in a point mutation of interest which in turn can result in a targeted mutation, if the base conversion does not cause a silent mutation, but rather a conversion of an amino acid encoded by the codon comprising the position to be converted with the base editor. Usually, base editors are thus used as molecular complex. Base editors, including, for example, CBEs (base editors mediating C to T conversion) and ABEs (adenine base editors mediating A to G conversion), are powerful tools to introduce direct and programmable mutations without the need for double-stranded cleavage (Komor et al., Nature, 2016, 533(7603), 420-424; Gaudelli et al., Nature, 2017, 551, 464-471). In general, base editors are composed of at least one DNA targeting module and a catalytic domain that deaminates cytidine or adenine. All four transitions of DNA (A→T to G→C and C→G to T→A) are possible as long as the base editors can be guided to the target site. Originally developed for working in mammalian cell systems, both BEs and ABEs have been optimized and applied in plant cell systems. Efficient base editing has been shown in multiple plant species (Zong et al., Nature Biotechnology, vol. 25, no. 5, 2017, 438-440; Yan et al., Molecular Plant, vol. 11, 4, 2018, 631-634; Hua et al., Molecular Plant, vol. 11, 4, 2018, 627-630). Base editors have been used to introduce specific, directed substitutions in genomic sequences with known or predicted phenotypic effects in plants and animals. But they have not been used for directed mutagenesis targeting multiple sites within a genetic locus or several loci to identify novel or optimized traits.

[0049] As used herein, the terms “(regeneration) booster”, “(regeneration) booster gene”, “(regeneration) booster polypeptide”, “boost polypeptide”, “boost gene” and “boost factor”, refer to a protein/peptide(s), or a (poly)nucleic acid fragment encoding the protein/polypeptide, causing improved plant regeneration of transformed or gene edited plant cells, which may be particularly suitable for improving genome engineering, i.e., the regeneration of a modified plant cell after genome engineering. Such protein/polypeptide may increase the capability or ability of a plant cell, preferably derived from somatic tissue, embryonic tissue, callus tissue or protoplast, to regenerate in an entire plant, preferably a fertile plant. Thereby, they may regulate somatic embryo formation (somatic embryogenesis) and/or they may increase the proliferation rate of plant cells. The regeneration of transformed or gene edited plant cells may include the process of somatic embryogenesis, which is an artificial process in which a plant or embryo is derived from a single somatic cell or group of somatic cells. Somatic embryos are formed from plant cells that are not normally involved in the development of embryos, i.e. plant tissue like buds, leaves, shoots etc. Applications of this process may include: clonal propagation of genetically uniform plant material; elimination of viruses; provision of source tissue for genetic transformation; generation of whole plants from single cells, such as protoplasts; development of synthetic seed technology. Cells derived from competent source tissue may be cultured to form a callus. Further, the term “regeneration booster” may refer to any kind of chemical having a proliferative and/or regenerative effect when applied to a plant cell, tissue, organ, or whole plant in comparison to a no-treated control. The particular artificially created regeneration booster polypeptides according to the present invention may have the dual function of increasing plant regeneration as well as increasing desired genome modification and gene editing outcomes.

[0050] A “catalytically active fragment” as used herein means a fragment of an enzyme, particularly of a multi-domain enzyme as Pol ⊖, wherein the catalytically active fragment is still enzymatically active and acts on the same target sequence as the cognate full-length enzyme, wherein the catalytically active fragment may have a substrate specificity and/or catalytic mechanism different to the full-length enzyme in the case of multidomain enzymes (cf. Black et al., 2019, supra, for Pol θ). Individual catalytical domains of an enzyme (e.g., the HNH and the RuvC domain of Cas9) may be presented as individual catalytical fragments. For enzymes exclusively comprising one catalytical domain, for example, a truncated version can serve as catalytically active fragment, wherein the fragment still fulfills the same or comparable function (i.e., catalytic activity) as the full-length or wild-type enzyme.

[0051] A “CRISPR nuclease”, as used herein, is a specific form of a site-directed nuclease and refers to any nucleic acid guided nuclease which has been identified in a naturally occurring CRISPR system, which has subsequently been isolated from its natural context, and which preferably has been modified or combined into a recombinant construct of interest to be suitable as tool for targeted genome engineering. Any CRISPR nuclease can be used and optionally reprogrammed or additionally mutated to be suitable for the various embodiments according to the present invention as long as the original wild-type CRISPR nuclease provides for DNA recognition, i.e., binding properties. CRISPR nucleases also comprise mutants or catalytically active fragments or fusions of a naturally occurring CRISPR effector sequences, or the respective sequences encoding the same. A CRISPR nuclease may in particular also refer to a CRISPR nickase or even a nuclease-dead variant of a CRISPR polypeptide having endonucleolytic function in its natural environment. A variety of different CRISPR nucleases/systems and variants thereof are meanwhile known to the skilled person and include, inter alia, CRISPR/Cas systems, including CRISPR/Cas9 systems (EP2771468), CRISPR/Cpf1 systems (EP3009511B11), CRISPR/C2C2 systems, CRISPR/CasX systems, CRISPR/CasY systems, CRISPR/Cmr systems, CRISPR/MAD systems, including, for example, CRISPR/MAD7 systems (WO2018236548A1) and CRISPR/MAD2 systems, CRISPR/CasZ systems and/or any combination, variant, or catalytically active fragment thereof. A nuclease may be a DNAse and/or an RNAse, in particular taking into consideration that certain CRISPR effector nucleases have RNA cleavage activity alone, or in addition to the DNA cleavage activity.

[0052] A “CRISPR system” as used herein may be understood as a combination of a CRISPR nuclease or CRISPR effector, or a nickase or a nuclease-dead variant of said nuclease, or a functional active fragment or variant thereof together with the cognate guide RNA (or pegRNAs for a Prime Editing CRISPR system, or a crRNA) guiding the relevant CRISPR nuclease.

[0053] A “genome” as used herein is to be understood broadly and comprises any kind of genetic information (RNA/DNA) inside any compartment of a living cell. In the context of a “genome modification”, the term thus also includes artificially introduced genetic material, which may be transcribed and/or translated, inside a living cell, for example, an episomal plasmid or vector, or an artificial DNA integrated into a naturally occurring genome.

[0054] The term of “genome engineering” as used herein refers to all strategies and techniques for the genetic modification of any genetic information (DNA and RNA) or genome of a plant cell, comprising genome transformation, genome editing, but also including less site-specific techniques, including TILLING and the like. As such, “genome editing” (GE) more specifically refers to a special technique of genome engineering, wherein a targeted, specific modification of any genetic information or genome of a plant cell. As such, the terms comprise gene editing of regions encoding a gene or protein, but also the editing of regions other than gene encoding regions of a genome. It further comprises the editing or engineering of the nuclear (if present) as well as other genetic information of a plant cell, i.e., of intronic sequences, non-coding RNAs, miRNAs, sequences of regulatory elements like promoter, terminator, transcription activator binding sites, cis or trans acting elements. Furthermore, “genome engineering” also comprises an epigenetic editing or engineering, i.e., the targeted modification of, e.g., DNA methylation or histone modification, such as histone acetylation, histone methylation, histone ubiquitination, histone phosphorylation, histone sumoylation, histone ribosylation or histone citrullination, possibly causing heritable changes in gene expression.

[0055] A “genome modification system” as used herein refers to any DNA, RNA and/or amino acid sequence introduced into the cell, on a suitable vector and/or coated on a particles and/or directly introduced. A “genome editing” system more specifically refers to any DNA, RNA and/or amino acid sequence introduced into the cell, on a suitable vector and/or coated on a particles and/or directly introduced, wherein the “genome editing system” comprises at least one component being, encoding, or assisting a site-directed nuclease, nickase or inactivated variant thereof in modifying and/or repairing a genomic target site.

[0056] A “genomic target sequence” as used herein refers to any part of the nuclear and/or organellar genome of a plant cell, whether encoding a gene/protein or not, which is the target of a site-directed genome editing or gene editing experiment.

[0057] The term “operatively linked”, “operably linked” or “functionally linked” specifically in the context of molecular constructs, for example plasmids or expression vectors, means that one element, for example, a regulatory element, or a first protein-encoding sequence, is linked in such a way with a further part so that the protein-encoding nucleotide sequence, i.e., is positioned in such a way relative to the protein-encoding nucleotide sequence on, for example, a nucleic acid molecule that an expression of the protein-encoding nucleotide sequence under the control of the regulatory element can take place in a living cell.

[0058] A “plant material” as used herein refers to any material which can be obtained from a plant during any developmental stage. The plant material can be obtained either in planta or from an in vitro culture of the plant or a plant tissue or organ thereof. The term thus comprises plant cells, tissues and organs as well as developed plant structures as well as sub-cellular components like nucleic acids, polypeptides and all chemical plant substances or metabolites which can be found within a plant cell or compartment and/or which can be produced by the plant, or which can be obtained from an extract of any plant cell, tissue or a plant in any developmental stage. The term also comprises a derivative of the plant material, e.g., a protoplast, derived from at least one plant cell comprised by the plant material. The term therefore also comprises meristematic cells or a meristematic tissue of a plant.

[0059] A “PLT” as used herein is means a regeneration booster from the PLETHORA family. Plant development is characterized by repeated initiation of meristems, regions of dividing cells that give rise to new organs. During lateral root (LR) formation, new LR meristems are specified to support the outgrowth of LRs along a new axis. The determination of the sequential events required to form this new growth axis has been hampered by redundant activities of key transcription factors. The effects of three PLETHORA (PLT) transcription factors, PLT3, PLT5, and PLT7, during LR outgrowth were already characterized. It was found that in plt3/plt5/plt7 triple mutants, the morphology of lateral root primordia (LRP), the auxin response gradient, and the expression of meristem/tissue identity markers are impaired from the “symmetry-breaking” periclinal cell divisions during the transition between stage I and stage II, wherein cells first acquire different identities in the proximodistal and radial axes. Particularly, PLT1, PLT2, and PLT4 genes that are typically expressed later than PLT3, PLT5, and PLT7 during LR outgrowth are not induced in the mutant primordia, rendering “PLT-null” LRP. Reintroduction of any PLT clade member in the mutant primordia completely restores layer identities at stage II and rescues mutant defects in meristem and tissue establishment. Therefore, all PLT genes can activate the formative cell divisions that lead to de novo meristem establishment and tissue patterning associated with a new growth axis (Du and Scheres, PNAS 2017, https://doi.org/10.1073/pnas.1714410114). Still, the role of PLT proteins and variants thereof in gene editing and to promote gene editing in a concerted manner together with other regeneration boosters to increase cell regeneration during non-naturally occurring processes like genome editing was not studied in the above cited prior art.

[0060] The terms “plant”, “plant organ”, or “plant cell” as used herein refer to a plant organism, a plant organ, differentiated and undifferentiated plant tissues, plant cells, seeds, and derivatives and progeny thereof. Plant cells include without limitation, for example, cells from seeds, from mature and immature embryos, meristematic tissues, seedlings, callus tissues in different differentiation states, leaves, flowers, roots, shoots, male or female gametophytes, sporophytes, pollen, pollen tubes and microspores, protoplasts, macroalgae and microalgae. The different eukaryotic cells, for example, animal cells, fungal cells or plant cells, can have any degree of ploidity, i.e. they may either be haploid, diploid, tetraploid, hexaploid or polyploid.

[0061] The term “plant parts” as used herein includes, but is not limited to, isolated and/or pre-treated plant parts, including organs and cells, including protoplasts, callus, leaves, stems, roots, root tips, anthers, pistils, seeds, grains, pericarps, embryos, pollen, sporocytes, ovules, male or female gametes or gametophytes, cotyledon, hypocotyl, spike, floret, awn, lemma, shoot, tissue, petiole, cells, and meristematic cells.

[0062] As used herein “a preselected site”, “predetermined site” or “predefined site” indicates a particular nucleotide sequence in the genome (e.g. the nuclear genome, or the organellar genome, including the mitochondrial or chloroplast genome) at which location it is desired to insert, replace and/or delete one or more nucleotides. The predetermined site is thus located in a “genomic target sequence/site” of interest and can be modified in a site-directed manner using a site- or sequence-specific genome editing system.

[0063] A “Prime Editing system” as used herein refers to a system as disclosed in Anzalone et al. (2019). Search-and-replace genome editing without double-strand breaks (DSBs) or donor DNA. Nature, 1-1). Base editing as detailed above, does not cut the double-stranded DNA, but instead uses the CRISPR targeting machinery to shuttle an additional enzyme to a desired sequence, where it converts a single nucleotide into another. Many genetic traits in plants and certain susceptibility to diseases caused by plant pathogens are caused by a single nucleotide change, so base editing offers a powerful alternative for GE. But the method has intrinsic limitations, and is said to introduce off-target mutations which are generally not desired for high precision GE. In contrast, Prime Editing (PE) systems steer around the shortcomings of earlier CRISPR based GE techniques by heavily modifying the Cas9 protein and the guide RNA. The altered Cas9 only “nicks” a single strand of the double helix, instead of cutting both. The new guide RNA, called a pegRNA (prime editing extended guide RNA), contains an RNA template for a new DNA sequence, to be added to the genome at the target location. That requires a second protein, attached to Cas9 or a different CRISPR effector nuclease: a reverse transcriptase enzyme, which can make a new DNA strand from the RNA template and insert it at the nicked site. To this end, an additional level of specificity is introduced into the GE system in view of the fact that a further step of target specific nucleic acid::nucleic acid hybridization is required. This may significantly reduce off-target effects. Further, the PE system may significantly increase the targeting range of a respective GE system in view of the fact that BEs cannot cover all intended nucleotide transitions/mutations (C→A, C→G, G→C, G→T, A→C, A→T, T→A, and T→G) due to the very nature of the respective systems, and the transitions as supported by BEs may require DSBs in many cell types and organisms.

[0064] As used herein, a “regulatory sequence”, or “regulatory element” refers to nucleotide sequences which are not part of the protein-encoding nucleotide sequence but mediate the expression of the protein-encoding nucleotide sequence. Regulatory elements include, for example, promoters, cis-regulatory elements, enhancers, introns or terminators. Depending on the type of regulatory element it is located on the nucleic acid molecule before (i.e., 5′ of) or after (i.e., 3′ of) the protein-encoding nucleotide sequence. Regulatory elements are functional in a living plant cell.

[0065] The terms “transformation”, “transfection”, “transformed”, and “transfected” are used interchangeably herein for any kind of introduction of a material, including a nucleic acid (DNA/RNA), amino acid, chemical, metabolite, nanoparticle, microparticle and the like into at least one cell of interest by any kind of physical (e.g., bombardment), chemical or biological (e.g., Agrobacterium) way of introducing the relevant at least one material. A variety of different techniques is available to the skilled person for various types of target cells, tissues, organs, or materials of interest to be transformed/transfected.

[0066] The term “transgenic” as used according to the present disclosure refers to a plant, plant cell, tissue, organ or material which comprises a gene or a genetic construct, comprising a “transgene” that has been transferred into the plant, the plant cell, tissue organ or material by natural means or by means of transformation techniques from another organism. The term “transgene” comprises a nucleic acid sequence, including DNA or RNA, or an amino acid sequence, or a combination or mixture thereof. Therefore, the term “transgene” is not restricted to a sequence commonly identified as “gene”, i.e. a sequence encoding a protein. It can also refer, for example, to a non-protein encoding DNA or RNA sequence, or part of a sequence. Therefore, the term “transgenic” generally implies that the respective nucleic acid or amino acid sequence is not naturally present in the respective target cell, including a plant, plant cell, tissue, organ or material. The terms “transgene” or “transgenic” as used herein thus refer to a nucleic acid sequence or an amino acid sequence that is taken from the genome of one organism, or produced synthetically, and which is then introduced into another organism, in a transient or a stable way, by artificial techniques of molecular biology, genetics and the like.

[0067] As used herein, the term “transient” implies that the tools, including all kinds of nucleic acid (RNA and/or DNA) and polypeptide-based molecules optionally including chemical carrier molecules, are only temporarily introduced and/or expressed and afterwards degraded by the cell, whereas “stable” implies that at least one of the tools is integrated into the nuclear and/or organellar genome of the cell to be modified. “Transient expression” refers to the phenomenon where the transferred protein/polypeptide and/or nucleic acid fragment encoding the protein/polypeptide is expressed and/or active transiently in the cells, and turned off and/or degraded shortly with the cell growth. Transient expression thus also implies a stably integrated construct, for example, under the control of an inducible promoter as regulatory element, to regulate expression in a fine-tuned manner by switching expression on or off.

[0068] As used herein, “upstream” indicates a location on a nucleic acid molecule which is nearer to the 5′ end of said nucleic acid molecule. Likewise, the term “downstream” refers to a location on a nucleic acid molecule which is nearer to the 3′ end of said nucleic acid molecule. For avoidance of doubt, nucleic acid molecules and their sequences are typically represented in their 5′ to 3′ direction (left to right).

[0069] The terms “vector”, or “plasmid (vector)” refer to a construct comprising, inter alia, plasmids or (plasmid) vectors, cosmids, artificial yeast- or bacterial artificial chromosomes (YACs and BACs), phagemides, bacterial phage based vectors, Agrobacterium compatible vectors, an expression cassette, isolated single-stranded or double-stranded nucleic acid sequences, comprising sequences in linear or circular form, or amino acid sequences, viral vectors, viral replicons, including modified viruses, and a combination or a mixture thereof, for introduction or transformation, transfection or transduction into any eukaryotic cell, including a plant, plant cell, tissue, organ or material according to the present disclosure. A “nucleic acid vector, for instance, is a DNA or RNA molecule, which is used to deliver foreign genetic material to a cell, where it can be transcribed and optionally translated. Preferably, the vector is a plasmid comprising multiple cloning sites. The vector may further comprise a “unique cloning site” a cloning site that occurs only once in the vector and allows insertion of DNA sequences, e.g. a nucleic acid cassette or components thereof, by use of specific restriction enzymes. A “flexible insertion site” may be a multiple cloning site, which allows insertion of the components of the nucleic acid cassette according to the invention in an arrangement, which facilitates simultaneous transcription of the components and allows activation of the RNA activation unit.

[0070] Whenever the present disclosure relates to the percentage of the homology or identity of nucleic acid (RNA or DNA) or amino acid sequences to each other, this identity implies the identity over the entire length of the sequences to be compared to each other, wherein these identity or homology values define those as obtained by using the EMBOSS Water Pairwise Sequence Alignments (nucleotide) program (http://www.ebi ac.uk/Tools/psa/enboss water/nucleotide.html) nucleic acids or the EMBOSS Water Pairwise Sequence Alignments (protein) program (htp://www.ebi ac.uk/Tools/psa/emboss water/) for amino acid sequences. Those tools provided by the European Molecular Biology Laboratory (EMBL) European Bioinformatics Institute (EBI) for local sequence alignments use a modified Smith-Waterman algorithm (see http://www.ebiac.uk/Tools/psa/and Smith, T. F. & Waterman, M. S. “Identification of common molecular subsequences” Journal of Molecular Biology, 1981 147 (1):195-197). When conducting an alignment, the default parameters defined by the EMBL-EBI are used. Those parameters are (i) for amino acid sequences: Matrix=BLOSUM62, gap open penalty=10 and gap extend penalty=0.5 or (ii) for nucleic acid sequences: Matrix=DNAfull, gap open penalty=10 and gap extend penalty=0.5.

[0071] Whenever the present disclosure refers to a POLQ gene, a complete POLQ gene is meant, or a functional domain thereof, wherein such a functional domain may be independently selected from the three domains of Pol ⊖, namely a (i)N-terminal helicase-like domain, a (ii) large central domain harboring a Rad51 interaction motif, and/or a (iii)C-terminal polymerase domain. The same applies, whenever the present disclosure refers to the expression of Pol θ.

[0072] This is to be understood as expression of the full length enzyme, or the expression of at least one of the functional domain thereof independently selected from the three domains of Pol ⊖, namely a (i)N-terminal helicase-like domain, a (ii) large central domain harboring a Rad51 interaction motif, and a (iii)C-terminal polymerase domain, wherein the at least one domain can be provided alone, or in combination together with another Pol ⊖, or in combination, e.g., as fusion, with another effector domain, e.g. a CRISPR Cas system, a zinc finger nuclease (ZFN) system, a transcription activator-like nuclease (TALEN) system, or a meganuclease system component, or any combination, variant (for example, nickase, nuclease-dead variant), or catalytically active fragment thereof.

### DETAILED DESCRIPTION

[0073] The present invention is based upon the finding that DNA polymerase theta (Pol θ)-originally described as leading enzyme during endogenous MMEJ and HMEJ pathways—is surprisingly significantly improving genome editing (GE) outcomes, preferably in plant cells, when the Pol θ-meditated pathway is activated in a targeted manner, not shut-down or decreased as speculated in previous reports.

[0074] In a first aspect of the present invention, there may thus be provided a method for targeted genome modification in a eukaryotic cell, preferably for increasing targeted insertion of a DNA insert at at least one target genomic sequence in a eukaryotic cell, comprising or consisting of the steps: a) providing at least one eukaryotic cell to be modified; b) promoting DNA polymerase theta (Pol θ) activity, or of at least one functional domain thereof, in said cell, wherein the promotion of Pol θ activity increases the DNA insertion efficiency during genome modification; c) introducing into the at least one eukaryotic cell (i) at least one genome modification system, preferably a genome editing system comprising at least one site-directed nuclease, nickase or an inactivated nuclease, preferably a nucleic acid guided nuclease, nickase or an inactivated nuclease, or a sequence encoding the same, and optionally at least one guide molecule, or a sequence encoding the same and (ii) at least one single-stranded or double-stranded DNA insert, or a sequence encoding the same; d) cultivating the at least one eukaryotic cell under conditions allowing (i) the promotion of DNA polymerase Pol θ (Pol θ) activity; and (ii) the activity of the at least one genome editing system and the at least one DNA insert and optionally the at least one guide molecule; and e) obtaining at least one modified cell comprising the sequence of the DNA insert integrated at or close to the target genomic site; and f) optionally: obtaining a eukaryotic organism, plant tissue, organ or seed regenerated from the at least one modified cell.

[0075] In the various embodiments as disclosed herein for the above method, steps (b) and (c) may take place simultaneously, or subsequently, for promoting plant cell proliferation and/or to assist in a targeted modification of at least one genomic target sequence of a eukaryotic cell of interest.

[0076] A “promotion” of Pol θ activity in the sense of the present invention has to be understood broadly and implies a direct upregulation or overexpression of Pol ⊖, or of a functional domain/fragment thereof, or an indirect promotion of Pol θ activity by influencing the stability or half-half of Pol θ by any chemical or biological agent, or the indirect promotion of Pol θ activity by pathway engineering so that a DNA repair pathway hampering or reducing the activity of Pol θ is modified in a targeted manner to promote Pol θ activity. A promotion or promoting of DNA Pol θ activity may thus imply any upregulation or enhanced activity of the Pol θ activity in comparison to a control cell. This may imply the overexpression of the enzyme to achieve higher levels of enzyme (i.e., more enzyme/cell on a quantitative scale), the upregulation via expression of a heterologous/recombinant Pol θ in a target cell (i.e., a particularly active variant of Pol θ), or a catalytically active fragment thereof in a cell of interest, the pathway engineering, meaning that cellular pathways competing with Pol θ activity are regulated in a way that the Pol θ pathway and thus the Pol θ activity is improved, or any chemical or biological agent that, when provided to an organism or to a cell culture, favors the Pol θ pathway and/or activity.

[0077] In one embodiment, it is preferred, if the promotion of Pol θ activity is to be understood as promotion of the activity of the full length Pol θ, or as promotion of at least one functional domain (or, as synonymously used herein, of a functional fragment thereof) of Pol θ. As described above, Pol θ consists of three individual domains, which are an (i)N-terminal helicase-like domain, a (ii) large central domain harboring a Rad51 interaction motif, and a (iii) C-terminal polymerase domain.

[0078] It is especially preferred that the promotion of Pol θ activity is achieved via direct upregulation or overexpression of the full length Pol θ, or by direct upregulation or overexpression of at least the (iii)C-terminal polymerase domain of Pol θ as preferred functional domain to be promoted.

[0079] Likewise, an indirect promotion can also be achieved by specifically promoting the activity of at least the functional domain of the C-terminal polymerase domain of Pol θ.

[0080] In certain embodiments, promoting of Pol θ may be performed by enhancing the cellular level of polymerase Pol θ. Obviously, this can be achieved by overexpression of a recombinant POLQ gene, by activating expression of an endogenous POLQ gene, by activating the pathway leading to Pol θ expression, by providing new variants of Pol θ to a cell of interest (in a stable or in a transient manner) and the like.

[0081] Preferred embodiments may include, for example, promoting Pol θ by expressing a heterologous POLQ sequence encoding a heterologous Pol θ and/or modification of the endogenous POLQ sequence to achieve a promotion of Pol θ activity and/or expressing a heterologous POLQ functional domain and/or modification of at least one functional domain of the endogenous POLQ sequence to achieve a promotion of Pol θ activity. In certain preferred embodiments, the Pol θ activity may be promoted indirectly by the inhibition of competing repair pathways (mainly: HR and NHEJ) and, in turn, by favoring the MMEJ/HMEJ pathway.

[0082] A “DNA insert” as used herein in the context of the methods of the present invention is to be distinguished from a repair template (RT), which understanding is closely related to the naturally occurring Pol θ repair pathway, which is used herein in a modified manner to optimize GE outcomes. The pronounced functional difference is that for HDR, the repair template serves as a template, which means that the DNA strand is synthesized based on the sequence of the RT (recombination), whereas for MMEJ/HMEJ the DNA insert is itself inserted (except for the homology arm (for MMEJ<25 nt and for HMEJ 25-2,000 nt)). Functionally, MMEJ/HMEJ-mediated repair, if used for genome editing, can thus be qualified as an end joining rather than a recombination so that the terms “DNA insert” and “RT” are used differently before this technical background. The methods of the present invention, therefore, exploit the naturally occurring MMEJ/HMEJ pathways to provide improved GE strategies. FIGS. 4 and 5 more specifically illustrate the specific features of a DNA insert (named “Transgene (ZmUbi10)” in FIG. 4) in the sense of the present invention and suitable DNA insert design strategies. In certain embodiments, a DNA insert may also be understood as an RNA insert, or as an insert comprising RNA and DNA portions, as long as this DNA and/or RNA insert is intended to be inserted during MMEJ/HMEJ, or wherein the RNA insert serves as template for the DNA insert.

[0083] In one embodiment of the methods as disclosed herein, the DNA polymerase Pol θ sequence, or the POLQ sequence encoding the same, may be selected from the group consisting of SEQ ID NO: 1 to SEQ ID NO: 26, or a sequence, including a functional domain, having at least at least 70%, 71%, 72%, 73%, 74%, 75%, 76%, 77%, 78%, 79%, 80%, 81%, 82%, 83%, 84%, 85%, 86%, 87%, 88%, 89%, 90%, 91%, 92%, 93%, 94%, 95%, 96%, 97%, 98% or 99% sequence identity thereto. Of course, any other naturally occurring Pol θ sequence, or the POLQ sequence encoding the same, can be the subject of a targeted modification, whereas the above sequences may be representative candidates suitable for use in a plant cell. For plants as for other eukaryotic organisms, it may generally be preferably to use a phylogenetically related POLQ sequence for phylogenetically related cells when the activation of Pol θ is achieved via overexpression of a recombinant Pol θ. For example, it will be preferred to use a monocot-derived POLQ sequence for us in the same, or another monocot plant cell.

[0084] Still, certain POLQ sequences, for example certain Zea mays sequences, may also perform particularly well in a dicot plant like Beta spp., in case the target cell specific regulatory elements are used and a suitable codon optimization for the target cell is performed before to obtain sufficient expression levels of the recombinantly produced enzyme. The nature of the specific Pol theta enzymes as analyzed in detail herein and the relationship between these sequences is illustrated in FIGS. 2 and 3.

[0085] Technically, the length of the DNA insert according to the various aspects and methods as disclosed herein can be anything up to 30 kb including homology arms. So the edit could be as short as 1 nt but then to form the complete insert one would need to add the homology arms. As there are no technical restrictions, the DNA insert design and the length will thus be rather flexible depending on the genomic edit to be inserted.

[0086] In other embodiment, the DNA insert may be presented as a ribonucleic acid (RNA) molecule, or a molecule comprising at least one RNA portion, as precursor molecule, and this precursor can be additionally provided together with the methods as disclosed herein as DNA insert, or more particularly, as precursor thereof. The RNA-based precursor of interest can be used directly (as RNA) or indirectly via cDNA synthesis. In certain embodiments, at least one repair template (RT), which may be a single-stranded or double-stranded nucleic acid molecule, can be additionally provided together with the methods as disclosed herein. Therefore, the RT may be a single-stranded or double-stranded DNA molecule and/or a single-stranded or double-stranded RNA molecule, or a hybrid between RNA and DNA, wherein the RNA and DNA portion may be covalently or non-covalently linked to each other.

[0087] Using RNA as an RT and/or as precursor for a DNA insert can represent an attractive alternative for expanding the flexibility during genome editing, as many copies of the RNA can be produced from a limited number of DNA templates in vivo. This approach can thus remove the need to deliver massive amount of RT to a cell, e.g., via particle bombardment. Further, a frequent problem with single copy of RT delivered via Agrobacterium mediated transformation can be avoided.

[0088] All sequence identity ranges provided herein in relation to a parent nucleotide or amino acid sequence as provided in the attached sequence listing take into consideration that a nucleotide sequence representing the coding sequence of a gene may be codon-optimized when used in a different organism. An amino acid sequence representing an enzyme/structural protein may be truncated (to provide only one domain, or a more compact form of a(n) enzyme/protein of interest) or it may contain a mutation at a position not directly influencing the function of the cognate wild-type or reference sequence. Sequence identity ranges are thus disclosed and claimed under the proviso that the such identified nucleotide and/or amino acid sequence still overall fulfills the same function as the respective parent sequence the sequence identity refers to.

[0089] In certain embodiments, the activity of DNA polymerase Pol θ may be further promoted by modulating, preferably silencing, components of at least one competing DNA repair pathway, wherein the component belongs to the NHEJ or HDR repair pathway, or the sequence encoding the same, is selected from the group consisting of SEQ ID NO: 27 to SEQ ID NO: 114, or a sequence having at least at least 70%, 71%, 72%, 73%, 74%, 75%, 76%, 77%, 78%, 79%, 80%, 81%, 82%, 83%, 84%, 85%, 86%, 87%, 88%, 89%, 90%, 91%, 92%, 93%, 94%, 95%, 96%, 97%, 98% or 99% sequence identity thereto.

[0090] As detailed above, and as illustrated in FIG. 1, several endogenous repair pathways are competing in a eukaryotic cell when it comes up to a repair of a DSB or a single-strand break (SSB). With the knowledge about the impact of Pol θ in the MMEJ/HMEJ pathway and further for improving GE efficiency when Pol θ activity is increased, it was also found that the silencing, down-regulation or decrease of activity of a competing pathway, mainly NHEJ, will shift the endogenous response to the Pol θ-mediated pathway, which is favorable for the methods as disclosed herein. This strategy can be applied together with or alternatively to activating the Pol θ pathway. The present inventor found that particularly the NHEJ-related proteins DNA ligase 4, KU70 and/or KU80 or the HDR-related proteins RPA70C of various plants can be specifically silenced to favor the Pol θ pathway. Whereas a complete knock-out of certain NHEJ or HDR pathway players is conceivable, a silencing or down-regulation may be preferably, which is usually conducted just transiently, as all repair pathways as such are highly conserved and important for cellular genomic integrity so that a stable knock-out instead of a transient knock-down may have certain disadvantages.

[0091] In the context of the present disclosure, the terms “silencing” or “RNA interference” or “RNAi” refer to a gene down-regulation mechanism meanwhile demonstrated to exist in all eukaryotes.

[0092] The mechanism was first recognized in plants where it was called “post-transcriptional gene silencing” or “PTGS”. In RNAi, small RNAs (of about 21-24 nucleotides) function to guide specific effector proteins (e.g., members of the Argonaute protein family) to a target nucleotide sequence by complementary base pairing. The effector protein complex then down-regulates the expression of the targeted RNA or DNA. Small RNA-directed gene regulation systems were independently discovered (and named) in plants, fungi, worms, flies, and mammalian cells.

[0093] Collectively, PTGS, RNA silencing, and co-suppression (in plants); quelling (in fungi and algae); and RNAi (in Caenorhabditis elegans, Drosophila, and mammalian cells) are all examples of small RNA-based gene regulation systems.

[0094] In plants, during RNAi mechanism, silencing initiates with the enzyme Dicer and dsRNA is processed to convert the silencing trigger to ˜22-nucleotide, small interfering RNAs (siRNAs).

[0095] The antisense strand of siRNA become specific to endonuclease-protein complex, RNA-induced silencing complex (RISC), which then targets the homologous RNA and degrade it at specific site that results in the knock-down of protein expression. RNAi technology may thus be a substitute of complex molecular techniques because of containing several benefits: its specificity and sequence-based gene silencing. Plants can also control viral diseases by RNAi and reveal resistance when having proper anti-sense or hairpin RNAi constructs. In plants, specifically to achieve pathogen resistance, hairpin (hp) dsRNA including small hairpin RNA (shRNA), self-complementary hpRNA, and intron-spliced hpRNA can be formed in vivo using inverse repeat sequences from viral genomes. Among these, PTGS with the highest efficiency was elicited by the method involving self-complementary hairpin RNAs separated by an intron.

[0096] High resistance against viruses has been observed in plants even in the presence of inverted repeats of dsRNA-induced PTGS (IR-PTGS). Meanwhile, a variety of different RNAi constructs to be used as silencing construct to be used according to the various aspects and embodiments of the present disclosure are available to the skilled person for plant biotechnology (Younis et al., Int J Biol Sci. 2014; 10(10): 1150-1158). Several methods to induce RNAi, RNAi vectors, in vitro dicing and synthetic molecules are reported.

[0097] Mechanistically, introduction of short pieces of double-stranded RNA (dsRNA) and small or short interfering RNA (siRNA) into the cytosol, may initiate the pathway culminating targeted degradation of the specific cellular mRNA, i.e., the target mRNA of the gene transcript to be silenced according to the present invention. Another RNAi molecule are micro RNAs or miRNAs. In spite of similarity in size (20-24 nt), miRNA differ from siRNA in precursor structures, pathway of biogenesis, and modes of action. Artificial miRNAs are known to the skilled person. Both, miRNAs and siRNAs are known to be important regulators of gene expression in plants.

[0098] In another embodiment, an RNAi and self-cleaving hammerhead ribozyme may be used to achieve a desired modulation, also on a DNA level (Li Z., Rana T. M. Therapeutic targeting of microRNAs: current status and future challenges. Nat Rev Drug Discov. 2014; 13(8):622-638.).

[0099] These reagents allow for targeted control of gene expression by promoting the removal of specific mRNAs from the cytoplasm. The hammerhead ribozyme (HHR), first seen in tobacco ringspot virus satellite RNA, is an example of small nucleolytic RNA molecules capable of self-cleavage (i.e., the name ribozymes). Other autocatalytic (self-cleaving type) small RNA molecules are twister, twister sister, pistol, and hatchet ribozyme. HHRs are composed of a conserved central sequence with three radiating helical domains. Natural HHRs are not true ribozymes as they are only capable of carrying out a single self-cleavage reaction. Synthetic HHRs have been engineered to overcome this by separating the HHR into two components: ribozyme (the part of the HHR which remains unchanged) and substrate (the target sequence that will be cleaved). Another class of suitable modulators for the purpose of the present disclosure are riboswitches. Riboswitches are RNA elements that modulate mRNA expression through binding of a ligand, which is typically a small organic molecule or ion, to its aptamer domain. In one embodiment, the use of a riboswitch might be of interest to modify CPL3 expression in a tightly controlled manner. Meanwhile, a variety of ribozymes and riboswitches types including DNAzymes and temperature-sensitive ribozymes is available to the skilled person (Guha T K, Wai A, Hausner G. Programmable Genome Editing Tools and their Regulation for Efficient Genome Engineering. Comput Struct Biotechnol J. 2017; 15:146-160. Published 2017 Jan 12. doi:10.1016/j.csbj.2016.12.006).

[0100] The silencing of the methods as disclosed herein can thus be achieved by a silencing construct being an RNAi silencing construct specifically designed for the transient and preferably activatable down-regulation of at least one pathway protein, or better the sequence encoding the same on RNA level, e.g. the NHEJ pathway, competing with the Pol θ-mediated repair.

[0101] The silencing construct may be presented as vector for expression in a cell of interest, or the silencing construct can be prepared ex vivo to be added to a cell, material, tissue, organ or whole organism of interest. In one embodiment, the silencing construct may be operatively linked to a constitutively active promoter. In another embodiment, the silencing construct may be operatively linked to an inducible promoter to control expression of the construct depending on an inducer. Controlled expression of the silencing construct can allow targeted regulation of expression levels of a target protein of interest to be silenced in a temporal (e.g., only during a certain phase of plant development) and/or spatial (e.g., certain plant organs, tissues, cells, or special compartments/organelles) manner. In particular, due to the fact that the target sequences to be silenced play a critical role in plant immunity, it may have significant advantages to restrict silencing in a tempo-spatial and dose dependent way to avoid severe negative effects of the knock-out of plant immunity effectors like CPL proteins due to their highly relevant roles in defence and development.

[0102] In a preferred embodiment, a silencing construct of the present invention may be introduced in a transient manner which additionally guarantees that no genetic material is introduced into a plant or plant cell in an inheritable way.

[0103] In yet another embodiment, the silencing construct or the RNAi molecule does not share substantial sequence identity with other genomic regions in the genome of the plant cell, tissue, organ, whole plant, or plant material according to the present disclosure is to be understood as a molecule designed in silico based on the information of a sequence to be silenced in combination with the information of the genome to be modified so that the RNAi molecule does not comprise long stretches of identity to other regions in the genome other than the region to be modulated to avoid off-target effects. Usually, the identity to the sequence to be silenced will thus be very high, i.e., at least 90%, 91%, 92%, 93%, 94%, and more preferably at least 95%, 96%, 97%, 98% or even higher than 99%. The substantial identity to other genomic regions in the genome of the plant cell, tissue, organ, whole plant, or plant material will usually be below 25 bp, preferably below 20 bp, 19 bp, 18 bp, 17 bp, 16 bp, more preferably below 15 bp, 14 bp, 13 bp, 12 bp, 11 bp and most preferably below 10 bp of contiguous stretches aligning with another region of a genome of interest.

[0104] In yet a further embodiment of the methods as disclosed herein, promotion of the MMEJ/HMEJ pathway is further achieved by co-expressing and/or modulating Pol θ and at least one MRE11 and/or at least one PARP1 protein, wherein a MRE11 and/or PARP1 protein may improve the overall MMEJ/HMEJ pathway, wherein the MRE11 and/or PARP1 protein, or the sequence encoding the same, is selected from the group consisting of SEQ ID NO: 115 to SEQ ID NO: 162 or a sequence having at least at least 70%, 71%, 72%, 73%, 74%, 75%, 76%, 77%, 78%, 79%, 80%, 81%, 82%, 83%, 84%, 85%, 86%, 87%, 88%, 89%, 90%, 91%, 92%, 93%, 94%, 95%, 96%, 97%, 98% or 99% sequence identity thereto.

[0105] Particularly MRE11 and/or PARP1 were identified as relevant components of the Pol θ-mediated HMEJ/MMEJ pathway so that Pol θ activity can be indirectly enhanced by providing increased MRE11 and/or PARP1 protein amounts during GE so that these MRE11 and/or PARP1 proteins can enhance efficiency of the Pol θ-mediated HMEJ/MMEJ pathway.

[0106] According to the various aspects and embodiments disclosed herein, Pol θ activity will promote targeted genome modification by acting on an endogenous micro-homology mediated end joining (MMEJ) and/or a homology-mediated end-joining (HMEJ) pathway in a favorable manner assisting the targeted GE event to be inserted into a genomic target site of interest.

[0107] As central component, the methods of the present invention rely on a site-specific genome/gene editing system, i.e., a rare-cleaving and programmable site-directed nuclease. In preferred embodiments, the at least one site-directed nuclease, nickase or inactivated nuclease, or a sequence encoding the same, may be selected from the group consisting of a CRISPR/Cas system, preferably from a CRISPR/Cas12a or a CRISPR/Cas12b system, including a CRISPR/MAD7 system, a CRISPR/Cfp1 system, or a CRISPR/MAD2 system, from a CRISPR/Cas9 system, a CRISPR/CasX system, a CRISPR/CasY system, a CRISPR/Cas13 system, or a CRISPR/Csm system, a zinc finger nuclease (ZFN) system, a transcription activator-like nuclease (TALEN) system, or a meganuclease system, or any combination, variant, or catalytically active fragment thereof. CRISPR nucleases and systems suitable for the methods as disclosed herein are defined and described above. In other preferred embodiments, the present invention relates to the use of nuclease—Pol θ fusions, wherein Pol θ, or at least one functional domain thereof is fused to at least one site-directed nuclease, nickase or inactivated nuclease, or a sequence encoding the same, may be selected from the group consisting of a Cas protein, preferably from a Cas12a or a Cas12b protein, including a MAD7 protein, a Cfp1 protein, or a MAD2 protein, from a Cas9 protein, a CasX protein, a CasY protein, a Cas13 protein, or a Csm protein, a zinc finger nuclease (ZFN), a transcription activator-like nuclease (TALEN), or a meganuclease, or any combination, variant, or catalytically active fragment thereof.

[0108] These nucleases, in comparison to TALEN or ZFN systems, may have the advantage that the RNA-guided CRISPR nuclease, nickase or variant can be easily programmed or re-programmed by just exchange the at least one guiding RNA to a new genomic target site of interest without the need to modify the CRISPR nuclease, nickase or variant as such.

[0109] In certain embodiments, CRISPR systems relying on double-strand break inducing nuclease may be used, wherein in other embodiments, a CRISPR system using a nickase or a nuclease-dead variant may be used, for example, a base editor system and/or a prime editing system as defined above.

[0110] In certain embodiments, the eukaryotic cell to be modified in a targeted manner with the methods of the present invention will be a plant cell, wherein the method may additionally comprise a step g) of screening for at least one plant tissue, organ, plant or seed regenerated from the at least or modified cell in the TO and/or T1 generation carrying the DNA insert.

[0111] In another embodiment, the at least one eukaryotic cell may be selected from a plant cell, or a mammalian cell. In view of the fact that the central Pol θ pathway to be activated along with site directed GE is conserved and present in plant and mammalian cells, including human cells, the methods as disclosed herein are not only suitable for plant genome engineering, but may likewise be employed for GE in mammalian cells, tissues, organs or materials, for example, for therapeutic purposes.

[0112] In preferred embodiments of the present disclosure, the at least one eukaryotic cell may be a plant cell, preferably wherein the plant cell may be a plant cell selected from the group consisting of Hordeum, Sorghum, Saccharum, Zea, Setaria, Oryza, Triticum, Secale, Triticale, Malus, Brachypodium, Aegilops, Daucus, Beta, Eucalyptus, Nicotiana, Solanum, Coffea, Vitis, Erythrante, Genlisea, Cucumis, Marus, Arabidopsis, Crucihimalaya, Cardamine, Lepidium, Capsella, Olmarabidopsis, Arabis, Brassica, Eruca, Raphanus, Citrus, Jatropha, Populus, Medicago, Cicer, Cajanus, Phaseolus, Glycine, Gossypium, Astragalus, Lotus, Torenia, Allium, Spinacia or Helianthus, preferably, the plant or plant cell originates from a species selected from the group consisting of Hordeum vulgare, Hordeum bulbusom, Sorghum bicolor, Saccharum officinarium, Zea spp., including Zea mays, Setaria italica, Oryza minuta, Oryza sativa, Oryza australiensis, Oryza alta, Triticum aestivum, Triticum durum, Secale cereale, Triticale, Malus domestica, Brachypodium distachyon, Hordeum marinum, Aegilops tauschii, Daucus glochidiatus, Beta spp., including Beta vulgaris, Daucus pusillus, Daucus muricatus, Daucus carota, Eucalyptus grandis, Nicotiana sylvestris, Nicotiana tomentosiformis, Nicotiana tabacum, Nicotiana benthamiana, Solanum lycopersicum, Solanum tuberosum, Coffea canephora, Vitis vinifera, Erythrante guttata, Genlisea aurea, Cucumis sativus, Marus notabilis, Arabidopsis arenosa, Arabidopsis lyrata, Arabidopsis thaliana, Crucihimalaya himalaica, Crucihimalaya wallichii, Cardamine nexuosa, Lepidium virginicum, Capsella bursa pastoris, Olmarabidopsis pumila, Arabis hirsute, Brassica napus, Brassica oleracea, Brassica rapa, Raphanus sativus, Brassica juncacea, Brassica nigra, Eruca vesicaria subsp. sativa, Citrus sinensis, Jatropha curcas, Populus trichocarpa, Medicago truncatula, Cicer yamashitae, Cicer bijugum, Cicer arietinum, Cicer reticulatum, Cicer judaicum, Cajanus cajanifolius, Cajanus scarabaeoides, Phaseolus vulgaris, Glycine max, Gossypium sp., Astragalus sinicus, Lotus japonicas, Torenia fournieri, Allium cepa, Allium fistulosum, Allium sativum, Allium tuberosum, Helianthus annuus, Helianthus tuberosus and/or Spinacia oleracea.

[0113] In certain embodiments, the method of the present invention may additionally comprise the step of introducing or applying at least one regeneration booster, or a sequence encoding the same, or a regeneration booster chemical.

[0114] According to the various aspects and embodiments disclosed herein, it may be suitable to combine genome editing (GE) with the provision of additional regeneration boosting genes/proteins to reduce the cell stress associated with the introduction of the GE tools. Suitable “regeneration boosters” as used herein may be selected based on their functions involved in promoting cell division and plant morphogenesis. In particular, a booster or booster system of interest should be compatible with a given plant without having adverse effects on plant development. The latter point is caused by the fact that naturally occurring booster proteins are usually transcription factors guiding the progression of cell differentiation at different positions in a precise manner and thus have central roles in plant development.

[0115] Certain regeneration booster sequences, usually representing transcription factors active during various stages of plant development and also known as morphogenic regulators in plants, are known for long, including the Wuschel (WUS) and babyboom (BBM) class of boosters (Mayer, K. F. et al. Role of WUSCHEL in regulating stem cell fate in the Arabidopsis shoot meristem. Cell 95, 805-815 (1998); Yadav, R. K. et al. WUSCHEL protein movement mediates stem cell homeostasis in the Arabidopsis shoot apex. Genes Dev 25, 2025-2030 (2011); Laux, T., Mayer, K. F., Berger, J. & JQrgens, G. The WUSCHEL gene is required for shoot and floral meristem integrity in Arabidopsis. Development 122, 87-96 (1996); Leibfried, A. et al. WUSCHEL controls meristem function by direct regulation of cytokinin-inducible response regulators. Nature 438, 1172-1175 (2005); for BBM: Hofmann, A Breakthrough in Monocot Transformation Methods, The Plant Cell, Vol. 28: 1989, September 2016). Others, including the RKD (including TaRKD4 disclosed herein as SEQ ID NOs: 52 and 53, or a variant, or a codon-optimized version thereof) and LEC family of transcription factors have been steadily emerging and are meanwhile known to the skilled person (Hofmann, A Breakthrough in Monocot Transformation Methods The Plant Cell, Vol. 28: 1989, September 2016; New Insights into Somatic Embryogenesis: LEAFY COTYLEDON1, BABY BOOM1 and WUSCHEL-RELATED HOMEOBOX4 Are Epigenetically Regulated in Coffea canephora, PLos one August 2013, vol. 8(8), e72160; LEAFY COTYLEDON1-CASEIN KINASE I-TCP15-PHYTOCHROME INTERACTING FACTOR4 Network Regulates Somatic Embryogenesis by Regulating Auxin Homeostasis Plant Physiology_, December 2015, Vol. 169, pp. 2805-2821; A. Cagliari et al. New insights on the evolution of Leafy cotyledon1 (LEC1) type genes in vascular plants Genomics 103 (2014) 380-387, U.S. Pat. No. 6,825,397B1; U.S. Pat. No. 7,960,612B2, WO2016146552A1). The Growth-Regulating Factor (GRF) family of transcription factors, which is specific to plants, is also known to the skilled person. At least nine GRF polypeptides have been identified in Arabidopsis thaliana (Kim et al. (2003) Plant J 36: 94-104), and at least twelve in Oryza sativa (Choi et al. (2004) Plant Cell Physiol 45(7): 897-904). The GRF polypeptides are characterized by the presence in their N-terminal half of at least two highly conserved domains, named after the most conserved amino acids within each domain: (i) a QLQ domain (InterPro accession IPR014978, PFAM accession PF08880), where the most conserved amino acids of the domain are Gln-Leu-Gln; and (ii) a WRC domain (InterPro accession IPR014977, PFAM accession PF08879), where the most conserved amino acids of the domain are Trp-Arg-Cys. The WRC domain further contains two distinctive structural features, namely, the WRC domain is enriched in basic amino acids Lys and Arg, and further comprises three Cys and one His residues in a conserved spacing (CX9CX10CX2H), designated as the Effector of transcription (ET) domain (Ellerstrom et al. (2005) Plant Molec Biol 59: 663-681). The conserved spacing of cysteine and histidine residues in the ET domain is reminiscent of zinc finger (zinc-binding) proteins. In addition, a nuclear localisation signal (NLS) is usually comprised in the GRF polypeptide sequences.

[0116] Another class of potential regeneration boosters, yet not studied in detail for their function in artificial genome/gene editing, is the class of PLETHORS (PLT) transcription factors as introduced and defined above.

[0117] Regeneration boosters derived from naturally occurring transcription factors, as, for example, BBM or WUS, and variants thereof, may have the significant disadvantage that uncontrolled activity in a plant cell over a certain period of time will have deleterious effects on a plant cell. Therefore, the present inventors conducted a series of in silico work to create fully artificial regeneration booster proteins after a series of multiple sequence alignment, domain shuffling, truncations and codon optimization for various target plants. By focusing on core consensus motifs, it was an object to identify new variants of regeneration boosters not occurring in nature that are particularly suitable for us in methods for genome modifications and gene editing. Various gymnosperm sequences occurring in different species presently not considered as having a regeneration booster activity of described booster genes and proteins were particularly considered in the design process of the new booster sequences.

[0118] Based on this work, the present applicant found that specific regeneration boosters, as well as certain modified regeneration boosters naturally acting as transcription factors artificially created (RBPs) perform particularly well in combination with the methods disclosed herein, as they promote regeneration and additionally have the capacity to improve genome modification or gene editing efficiencies. Further, the artificially created and then stepwise selected and tested regeneration boosters do not show pleiotropic effects and are particularly suitable to be used during any kind of genome modification such as gene editing.

[0119] In one embodiment, the regeneration booster may comprises at least one of an RBP and/or at least one PLT, preferably wherein the regeneration booster comprises at least one of an RBP, wherein the at least one regeneration booster sequence is individually selected from any one of SEQ ID NOs: 171, 195 to 201, and 209 to 211 or a sequence having at least 80%, 81%, 82%, 83%, 84%, 85%, 86%, 87%, 88%, 89%, 90%, 91%, 92%, 93%, 94%, 95%, 96%, 97%, 98% or 99% sequence identity thereto, or an active fragment thereof, or wherein the at least one regeneration booster sequence is encoded by a sequence individually selected from any one of SEQ ID NO: 172, 202 to 208, and 212 to 214 or a sequence having at least 70%, 71%, 72%, 73%, 74%, 75%, 76%, 77%, 78%, 79%, 80%, 81%, 82%, 83%, 84%, 85%, 86%, 87%, 88%, 89%, 90%, 91%, 92%, 93%, 94%, 95%, 96%, 97%, 98% or 99% sequence identity thereto.

[0120] In another embodiment, alone or in combination with using at least one RBP and/or at least one PLT as booster, a conventional booster may be applied so that the regeneration booster may be selected from the group consisting of BBM, WUS, WOX, RKD4, RKD2, including a RKD from Triticum aestivum, GRF (a growth-regulating factor described in the art for its activity as regeneration booster), LEC, or a variant thereof, or a sequence encoding the same.

[0121] In one embodiment, a gene encoding a regeneration booster as disclosed herein may comprise at least one regulatory element as detailed below. In view of the fact that the RBP regeneration booster genes disclosed herein are fully artificial, there is no classical “natural” regulatory element, e.g., a promoter, to be used. Therefore, the choice of at least one suitable regulatory element will be guided by the question of the host cell of interest and/or spatio-temporal expression patterns of interest, so that the optimum regulatory elements can be chosen to achieve a specific expression of the at least one regeneration booster gene of interest.

[0122] In one embodiment, wherein more than one regeneration booster gene are used, different promoters may be chosen, for example, the promoters having different activities so that the at least two genes can be expressed in a defined and controllable manner to have a stronger expression of a first regeneration booster protein/polypeptide (RBP) and a weaker expression of a second RBP, where a differential expression pattern may be desired.

[0123] In one embodiment, at least one regeneration booster, or a sequence encoding the same, or a regeneration booster chemical, can be provided before, simultaneously, or subsequently with/to other tools to be inserted, namely the at least one genome modification system, preferably the genome editing system, and the at least one DNA insert to reduce the number of transformation/transfection acts potentially stressful for a cell. For certain cells sensitive to transformation/transfection, regeneration booster chemicals may thus represent a suitable option, which may be provided before, simultaneously with, or soon after transforming/transfecting further genome or gene editing tools to reduce the cellular stress and to increase transformation and/or editing efficiency by stabilizing a cell and thus by reducing potentially harmful cellular stress responses.

[0124] In another embodiment, the genome editing system and the at least one regeneration booster, or the sequence encoding the same, may be provided subsequently or sequentially. By separating the introduction steps, the editing construct DNA integration of the site-directed nuclease, nickase or an inactivated nuclease encoding sequence can be avoided, where transient outcomes are of interest.

[0125] In certain embodiments, it is favourable that the at least one regeneration booster is active in a cell before further tools, i.e., the genome modification system and the DNA insert, are introduced to put the cell into a state of low cellular stress before performing genome or gene editing.

[0126] In certain embodiments of the methods disclosed herein, at least one first RBP or PLT, or a sequence encoding the same, preferably at least one RBP, most preferably RBP2, or the sequence encoding the same, may be provided and at least one further regeneration booster may be provided selected from: (i) at least one further RBP and/or PLT, or the sequence encoding the same, or a variant thereof, (ii) at least one BBM, or the sequence encoding the same, or a variant thereof, (iii) at least one WOX, including WUS1, WUS2, or WOX5, or the sequence encoding the same, or a variant thereof, (iv) at least one RKD4 or RKD2, including wheat RKD4, or the sequence encoding the same, or a variant thereof, (v) at least one GRF (growth-regulating factor), including Zea mays GRF5 and Zea mays GRF1/TOW, or the sequence encoding the same, or a variant thereof, and/or (vi) at least one LEC sequence, including LEC1 and LEC2, or the sequence encoding the same, or a variant thereof, and wherein the at least one second regeneration booster, or a sequence encoding the same, may be different to the first regeneration booster.

[0127] In one embodiment, at least one regeneration booster, or a sequence encoding the same, or a regeneration booster chemical, can be provided simultaneously with other tools to be inserted, namely the at least one genome modification system, preferably the genome editing system to reduce the number of transformation/transfection acts potentially stressful for a cell. For certain cells sensitive to transformation/transfection, regeneration booster chemicals may thus represent a suitable option, which may be provided before, simultaneously with, or soon after transforming/transfecting further genome or gene editing tools to reduce the cellular stress and to increase transformation and/or editing efficiency by stabilizing a cell and thus by reducing potentially harmful cellular stress responses.

[0128] In preferred embodiments, in case regeneration booster is provide as expression construct to a cell of interest together with the methods as disclosed herein, the expression construct(s) or plasmid(s), preferably including one encoding RBP2, may be provided to at least one plant cell simultaneously with other tools to decrease the total amount of transformation/transfection steps. However, in the case of a chemical booster, it could be delivered few hours before the other editing components, for example, to the culture medium to prepare the at least one cell for a subsequent transformation/transfection.

[0129] For any simultaneous or subsequent introduction of at least one regeneration booster, the regeneration booster and the optional further genome modification or genome editing system should be active, i.e., present in the active protein and/or RNA stage, in one and the same cell to be modified, preferably in the nucleus of the cell, or in an organelle comprising genomic DNA to be modified.

[0130] According to the various embodiments and aspects disclosed herein, it may be preferable to use a naturally occurring regeneration booster in addition to an artificial RBP according to the present invention, wherein the naturally occurring regeneration booster, e.g., BBM, WUS½, LEC½, GRF, or a PLT may be derived from a target plant to be transformed, or from a closely related species. For monocot plant modifications, for example, a booster protein with monocot origin (e.g., from Zea mays (Zm)) may be preferred, whereas for dicot plant modifications, a booster protein with dicot origin (e.g., originating from Arabidopsis thaliana (At), or Brassica napus (Bn)) may be preferred. The relevant booster sequences can be easily identified by sequence searches within the published genome data. Notably, regeneration boosters from one plant species may show a certain cross-species applicability so that, for example, a wheat-derived booster gene may be used in Zea mays, and vice versa, or a Arabidopsis—or Brachypodium-derived booster gene may be used in Helianthus, and vice versa. A PLT, WUS, WOX, BBM, LEC, RKD4, or GRF sequence as used herein, or a protein with a comparable regeneration booster function, may thus be derived from any plant species harbouring a corresponding gene encoding the respective booster in its genome.

[0131] In a further aspect according the present invention, compatible with all embodiments according to the first aspect as detailed above, there is provided a method for genome modification in a eukaryotic cell, preferably for increasing insertion of a DNA insert at at least one genomic sequence in a eukaryotic cell, wherein the method may comprise or consist of the steps: a) providing at least one eukaryotic cell to be modified; and b) promoting DNA polymerase Pol θ activity in said cell, wherein the method is suitable for random integration of the at least one DNA insert.

[0132] In yet a further aspect, there may be provided a genetically modified cell, tissue, organ or material, including a seed, obtainable by a method according to any one of the methods as disclosed herein.

[0133] In one embodiment, the cell, tissue, organ or material, including a seed, may be a plant cell, tissue, organ or material, including a seed.

[0134] In yet a further aspect, there may be provided a generally applicable expression construct assembly, which may be used according to the methods disclosed herein, wherein the expression construct assembly may comprise (i) at least one vector encoding at least one Pol θ sequence as defined above, and optionally comprising a construct encoding silencing components of at least one MMEJ/HMEJ competing repair pathway as defined above, and optionally a protein aiding Pol θ activity as defined above; and (ii) at least one vector encoding a gene encoding at least one genome editing system, preferably wherein the genome editing system is as defined as above, optionally comprising at least one vector encoding at least one guide molecule as defined above in the context of a CRISPR nuclease or system; and (iii) at least one vector encoding at least one DNA insert, or at least one single-stranded or double-stranded DNA insert as defined for the first aspect above; and (iv) optionally: at least one vector encoding at least one regeneration booster, preferably wherein the regeneration booster is as defined above; wherein (i), (ii), (iii), and/or (iv) may be encoded on the same, or on different vectors.

[0135] In one embodiment, the expression construct assembly may further comprise a vector encoding at least one marker, preferably wherein the marker is introduced in a transient manner, see, for example, SEQ ID NO: 165.

[0136] In yet a further embodiment, the expression construct assembly may comprise at least one construct or sequence individually selected from any one of SEQ ID NOs: 163 to 165, 170, 173 to 175, and 179 to 183, 185, 187 and 189, or a variant thereof with minor differences not effecting the encoded regions.

[0137] In one embodiment, the expression construct assembly may comprise or encode at least one regulatory sequence, wherein the regulatory sequence is selected from the group consisting of a core promoter sequence, a proximal promoter sequence, a cis regulatory sequence, a trans regulatory sequence, a locus control sequence, an insulator sequence, a silencer sequence, an enhancer sequence, a terminator sequence, an intron sequence, and/or any combination thereof.

[0138] Notably different components of a genome modification or editing system and/or a regeneration booster sequence and/or a guide molecule and/or a DNA template present on the same vector of an expression vector assembly may be comprise or encode more than one regulatory sequence individually controlling transcription and/or translation.

[0139] In one embodiment of the expression construct assembly described above, the construct comprises or encodes at least one regulatory sequence, wherein the regulatory sequence is selected from the group consisting of a core promoter sequence, a proximal promoter sequence, a cis regulatory sequence, a trans regulatory sequence, a locus control sequence, an insulator sequence, a silencer sequence, an enhancer sequence, a terminator sequence, an intron sequence, and/or any combination thereof.

[0140] In another embodiment of the expression construct assembly described above, the regulatory sequence comprises or encodes at least one promoter selected from the group consisting of ZmUbi1, BdUbi10, ZmEf1, a double 35S promoter, a rice U6 (OsU6) promoter, a rice actin promoter, a maize U6 promoter, PcUbi4, Nos promoter, AtUbi10, BdEF1, MeEF1, HSP70, EsEF1, MdHMGR1, or a combination thereof.

[0141] In a further embodiment of the expression construct assembly described above, the at least one intron is selected from the group consisting of a ZmUbi1 intron, an FL intron, a BdUbi10 intron, a ZmEf1 intron, a AdH1 intron, a BdEF1 intron, a MeEF1 intron, an EsEF1 intron, and a HSP70 intron.

[0142] In one embodiment of the expression construct assembly according to any of the embodiments described above, the construct comprises or encodes a combination of a ZmUbi1 promoter and a ZmUbi1 intron, a ZmUbi1 promoter and FL intron, a BdUbi10 promoter and a BdUbi10 intron, a ZmEf1 promoter and a ZmEf1 intron, a double 35S promoter and a AdH1 intron, or a double 35S promoter and a ZmUbi1 intron, a BdEF1 promoter and BdEF1 intron, a MeEF1 promoter and a MeEF1 intron, a HSP70 promoter and a HSP70 intron, or of an EsEF1 promoter and an EsEF1 intron.

[0143] In addition, the expression construct assembly may comprise at least one terminator, which mediates transcriptional termination at the end of the expression construct or the components thereof and release of the transcript from the transcriptional complex.

[0144] In one embodiment of the expression construct assembly according to any of the embodiments described above, the regulatory sequence may comprise or encode at least one terminator selected from the group consisting of nosT, a double 35S terminator, a ZmEf1 terminator, an AtSac66 terminator, an octopine synthase (ocs) terminator, or a pAG7 terminator, or a combination thereof. A variety of further suitable promoter and/or terminator sequences for use in expression constructs for different plant cells are well known to the skilled person in the relevant field.

[0145] A variety of suitable fluorescent marker proteins and fluorophores applicable over the whole spectrum, i.e., for all fluorescent channels of interest, for use in plant biotechnology for visualization of metabolites in different compartments are available to the skilled person, which may be used according to the present invention. Examples are GFP from Aequoria victoria, fluorescent proteins from Anguillajaponica, or a mutant or derivative thereof), a red fluorescent protein, a yellow fluorescent protein, a yellow-green fluorescent protein (e.g., mNeonGreen derived from a tetrameric fluorescent protein from the cephalochordate Branchiostoma lanceolatum), an orange, a red or far-red fluorescent protein (e.g., tdTomato (tdT), or DsRed), and any of a variety of fluorescent and coloured proteins may be used depending on the target tissue or cell, or a compartment thereof, to be excited and/or visualized at a desired wavelength.

[0146] All elements of the expression vector assembly can be individually combined. Further, the elements can be expressed in a stable or transient manner, wherein a transient introduction may be preferably. In certain embodiments, individual elements may not be provided as part of a yet to be expressed (transcribed and/or translated) expression vector, but they may be directly transfected in the active state, simultaneously or subsequently, and can form the expression vector assembly within one and the same IIM cell of interest to be modified. For example, it may be reasonable to first transform part of the expression vector assembly encoding a site-directed nuclease, which takes some time until the construct is expressed, wherein the cognate guide molecule is then transfected in its active RNA stage and/or at least one repair template is then transfected in its active DNA stage in a separate and subsequent introduction step to be rapidly available. The at least one regeneration booster sequence and/or the at least one genome modification or editing system and/or the at least one marker may also be transformed as part of one vector, as part of different vectors, simultaneously, or subsequently. The use of too many individual introduction steps should be avoided, and several components can be combined in one vector of the expression vector assembly, to reduce cellular stress during transformation/transfection. In certain embodiments, the individual provision of elements of the at least one regeneration booster sequence and/or the at least one genome modification or editing system and/or the at least one marker and/or the at least one guide molecule and/or the at least one repair template on several vectors and in several introduction steps may be preferable in case of complex modifications relying on all elements so that all elements are functionally expressed and/or present in a cell to be active in a concerted manner.

[0147] The present invention is further illustrated by the following non-limiting Examples.

### EXAMPLES

### Example 1: DNA Insert Design—Transgene Properties

[0148] Double-stranded oligonucleotides were used as DNA inserts. The structure of the 1.6 kb DNA insert (SEQ ID NO: 163) to target the Zea mays CWI2 gene promoter is visualized in FIGS. 4 and 5. The 1.5 kb sequence (SEQ ID NO: 164) to be integrated was framed with 50 nt homology arms on both sides.

### Example 2: Transformation of Gene Editing Components in Maize Immature Embryo—Delivery Methods

[0149] Plasmid Constructs Expressing:

[0150] MAD7 (for example, plasmid SEQ ID NO: 165, MAD7 SEQ ID NO: 166 (CDS) and 167 (PRT)) endonuclease and tDTomato (SEQ ID NO: 168 (CDS) and 169 (PRT)), a regeneration booster protein (for example, plasmid SEQ ID NO: 170, RBP2 CDS: 171, RBP2 Protein SEQ ID NO: 172), two guide RNAs (either GEMT201 (SEQ ID Nos: 173 and 176) with GEMT202 (SEQ ID NO: 174 and 177) or GEMT201 with GEMT248 (SEQ ID Nos: 175 and 178)), that direct the endonuclease to the target site (e.g. the CWI2 promoter, see FIGS. 6 and 7) and the double-stranded DNA insert (SEQ ID NO: 179) were co-bombarded into maize immature embryos (genotype A188) using biolistic delivery.

[0151] Step 1: Ear Sterilization

[0152] Maize ears with immature embryos size 0.5 to 2.5 mm were first sterilized with 10% bleach (8.25% sodium hypochlorite) plus 0.1% Tween 20 for 10 to 20 minutes or 70% ethanol for 10-15 minutes and then washed four times with sterilized H₂O. Sterilized ears were dried briefly in a sterile hood for 5 to 10 minutes.

[0153] Step 2: Immature Embryos Isolation for Gold Particle Bombardment

[0154] Immature embryos (preferably 1.2-1.5 mm of size, 0.8-1.8 mm also possible) were isolated under sterile conditions by first removing the top third of the kernels from the ears with a sharp scalpel. Then immature embryos were carefully pulled out of the kernel with a spatula. The freshly isolated embryos were placed onto the bombardment target area in an osmotic medium plate (N60SM-no2,4-D medium) with scutellum-side up. Plates were sealed and incubated at 25° C. in darkness for 4-20 hours (preferably 4 hours) before bombardment.

[0155] Step 3: Bombardment

[0156] First, gold particles were prepared as follows:
[0157] 1. The stock solution for gold particles can be prepared in advance, at least 1 day prior to bombardment and stored at −20° C. for at least 6 months.
[0158] 2. Weigh out 10 mg of gold particles (0.4-0.6 μm) into a 1.7 ml centrifuge tube (low retention).
[0159] 3. Add 1 mL of 100% ethanol (molecular biology grade), and vortex-mix for 2 min and sonicate in an ultrasonic water bath for 15 sec.
[0160] 4. Pellet the gold particles by centrifuging the tube for 1 min at 3000 rpm in a bench top microcentrifuge and then discard the supernatant.
[0161] 5. Repeat step 3-4 once.
[0162] 6. Add 1 ml of 70% ethanol and vortex-mix for 2 min.
[0163] 7. Incubate the tube for 15 min at room temperature. Mix the contents of the tube about three times during the incubation.
[0164] 8. Centrifuge the tube at 3000 rpm for 1 min, and then discard the supernatant.
[0165] 9. Repeat step 6-8 one more time.
[0166] 10. Add 1 ml of sterile Milli Q water and mix for 2 min or until the particles are completely suspended.
[0167] 11. Allow the particles to settle down for 1 min at room temperature and then centrifuge the tube at 3000 rpm for 1 min; discard the supernatant.
[0168] 12. Repeat step 10-11 two more times.
[0169] 13. Add 1.0 ml of sterile 50% (v/v) glycerol to the gold particles at a final concentration of 10 mg/ml.
[0170] 14. Store the gold particles at −20° C. until ready to use.

[0171] Then, DNA was coated onto the gold particles (for 10 bombardments) as follows:
[0172] 1. Vortex the previously prepared gold particles that were stored at −20° C. until they are completely re-suspended.
[0173] 2. Pipet out 100 μl of the gold particle suspension (1 mg) into a 1.7 ml microcentrifuge tube (low retention).
[0174] 3. Sonicate for 15 sec.
[0175] 4. While vortex (at low to middle speed), add the following in order to each 100 μl of gold particles in 50% glycerol: 10 μl of DNA 100 μl of 2.5 M CaCl2 (pre-cold on ice) 40 μl of 0.1 M cold spermidine (prepare right before use). (Important: The order of adding gold particles, DNA, CaCl2, and spermidine is important for the proper coating of the gold particles. Spermidine must be prepared fresh and kept on ice).
[0176] 5. Close the lids and continue vortexing for 5-10 minutes at RT.
[0177] 6. Allow the DNA-coated gold particles to settle 1 minute, spin for 5 seconds at the top speed, and then remove supernatant.
[0178] 7. Wash the pellet in 500 μl of 100% Ethanol without disturbing pellet for 1 minute.
[0179] 8. Remove supernatant without disturbing pellet.
[0180] 9. Repeat steps 7 and 8 one more time.
[0181] 10. Finally resuspend the DNA coated gold particles in 120 μl of 100% EtOH (for 10 bombardments). Gently vortex to resuspend.
[0182] 11. Quickly pipet 10 μl of the well-suspended gold particles with a wide open 20 μl tip from the tube onto the center of a macrocarrier and spread out the gold particles around the macrocarrier evenly (note: the particles tend to form clumps at this point). Air dry and use for bombardment as soon as possible (the DNA-coated gold particles must be used within 2 h).

[0183] In a next step, the prepared gold particles were bombarded into the prepared immature embryos (osmotic treatment 4-20 h pre-bombardment by incubation on N60SM-no2,4-D medium) using the following conditions: 3 shots per plate, 100 μg of gold particles per shot, 100 ng—200 ng of each plasmid DNA, and 500 ng of DNA insert per shot and 450-650 psi for 0.6 μm gold particles, at least 650 psi for 0.4 μm gold particles.

[0184] After the bombardment, immature embryos were incubated for 16 to 20 h on N60SM-no2,4-D media plates for a second osmotic treatment.

[0185] Step 3: Post Bombardment Culture and Regeneration

[0186] First, the formation of Type II calli was induced 16-20 h post bombardment. Therefore, embryos with dense fluorescent signals under a fluorescence microscope were selected and transferred from the N60SM-no2,4-D onto a N6-5Ag plate (˜15 embryos per plate) with scutellum-face-up. The embryos on the N6-5Ag plate were incubated at 27° C. in darkness for 14-16 days to induce type II calli. For type II callus regeneration, calli from the bombarded region of the plate were transferred to MRM1 medium and cultured on MRM1 medium at 25° C. in darkness until the somatic embryo matured (˜2 weeks). The mature somatic embryos were then transferred onto MS0 medium in a phytotray for embryo germination. Therefore, they were cultured in the full light chamber at 25° C. until the plants are ready for moving to the greenhouse (˜1 week).

[0187] Media Used: 1. N6-5Ag

| Compound | Amount [mg/L] |
|---|---|
| N6 salt | |
| N6 vitamin | |
| 2,4-D | 1.0 |
| Casein | 100.0 |
| Proline | 2,900 |
| Sucrose | 20,000 |
| Glucose | 5,000 |
| AgNO3 | 5 |
| Bacto-Agar | 8,000 |
| adjust pH to 5.8 | |

[0188] N6OSM-no2,4-D

| Compound | Amount [mg/L] |
|---|---|
| N6 salt | |
| Casein | 100.0 |
| L-Proline | 700 |
| Mannitol | 36,400 (0.2 M) |
| Sucrose | 20,000 |
| Sorbitol | 36,400 (0.2 M) |
| Bacto-Agar | 15,000 |
| adjust pH to 5.8 | |

[0189] MRM1

| Compound | Amount [mg/L] |
|---|---|
| MS salts | |
| MS vitamins | |
| Myoinositol | 100 |
| Sucrose | 6% |
| Bacto-Agar | 9,000 |
| adjust pH to 5.8 | |

[0190] MS0

| Compound | Amount [mg/L] |
|---|---|
| MS salts | |
| MS vitamins | |
| Myoinositol | 2,000 |
| Sucrose | 2% |
| Bacto-Agar | 8,000 |
| adjust pH to 5.0 | |

### Example 3: Identification of Successful Editing Events

[0191] Two weeks after bombardment, at the end of the type-II callus induction phase, type-II calluses from each bombardment plate were collected. Calluses developed from immature embryos on the same plate were pooled as one sample. Genomic DNA was extracted from each sample using a cetyltrimethylammonium bromide (CTAB)-chloroform-based method and droplet digital PCR (ddPCR) was performed to check for insertion of the DNA fragment at the target genomic locus (CWI2 promoter region).

[0192] Insertion junction analysis was performed by sanger sequencing. To this end, sample enrichment for insertion events was carried out by restriction digestion with unique enzymes such as BseX31, Eagl, Fsel, and Sspl that digest the CWI2 promoter region but not the inserted DNA fragment.

### Example 4: Boosting Pol θ-Mediated Transgene Integration by PoIQ Overexpression

[0193] In order to increase the efficiency of transgene integration the construct overexpressing ZmPoIQ (SEQ ID NOs: 180 (plasmid)) was co-bombarded with plasmid constructs expressing MAD7 (for example, plasmid SEQ ID NO: 165, MAD7 SEQ ID NO: 166 (CDS) and 167 (PRT)) endonuclease and tDTomato (SEQ ID NO: 168 (CDS) and 169 (PRT)), a regeneration booster protein (for example, plasmid SEQ ID NO: 170, RBP2 CDS: 171, RBP2 Protein SEQ ID NO: 172), two guide RNAs (either GEMT201 (SEQ ID Nos: 173 and 176) with GEMT202 (SEQ ID NO: 174 and 177) or GEMT201 with GEMT248 (SEQ ID Nos: 175 and 178)), that direct the endonuclease to the target site (e.g. the CWI2 promoter, see FIGS. 6 and 7) and the double-stranded DNA insert (SEQ ID NO: 179) into maize immature embryos using biolistic delivery (see example 2). All components were precipitated on the same gold particles. Successful editing events were determined according to the procedure described in example 3.

### Example 5: Generation of Pol θ-Repaired Plants with Targeted Transgene Integration

[0194] In addition to analyzing editing events at the embryonic stage, targeted insertion and its efficiency can also be investigated at the plant level. For this purpose, embryonic structures from Example 4 were allowed to regenerate into seedlings. Leaf tissue samples were harvested for genomic DNA isolation, ddPCR, and sequencing analysis. Leaves of the single regenerated plants were collected for DNA extraction. Editing at the target site can be analyzed using ddPCR as described in example 3 and/or using Sanger sequencing.

### Example 6: Combination of Pol θ Overexpression with Agents that Promote Pol θ-Mediated MMEJ/HMEJ Pathway Activity

[0195] To further promote the Pole-mediated MMEJ/HMEJ pathway and by that enhancing the efficiency of transgene integration even more, the construct overexpressing ZmPoIQ (SEQ ID NOs: 180 (plasmid)) was co-bombarded with plasmid constructs expressing MAD7 (for example, plasmid SEQ ID NO: 165, MAD7 SEQ ID NO: 166 (CDS) and 167 (PRT)) endonuclease and tDTomato (SEQ ID NO: 168 (CDS) and 169 (PRT)), a regeneration booster protein (for example, plasmid SEQ ID NO: 170, RBP2 CDS: 171, RBP2 Protein SEQ ID NO: 172), two guide RNAs (either GEMT201 (SEQ ID Nos: 173 and 176) with GEMT202 (SEQ ID NO: 174 and 177) or GEMT201 with GEMT248 (SEQ ID Nos: 175 and 178)), that direct the endonuclease to the target site (e.g. the CWI2 promoter, see FIGS. 6 and 7) and the double-stranded DNA insert (SEQ ID NO: 179) and vector constructs expressing proteins that are involved in the MMEJ/HMEJ pathway such as ZmPARP1 (SEQ ID NO: 141 (CDS) and 142 (PRT), encoded by GEMT341 (SEQ ID NO: 181)) and ZmMre11 (SEQ ID NO: 117 (CDS) and 118 (PRT), encoded by GEMT340 (SEQ ID NO: 182)). All components were precipitated on the same gold particles. Successful editing events were determined according to the procedure described in example 3.

### Example 7: Combination of PoIQ Overexpression with Agents that Inhibit Competing DNA Repair Pathways

[0196] To further promote Pol theta-mediated transgene integration NHEJ and HDR pathway inhibiting treatments will be performed. Competing NHEJ and HDR pathways can be downregulated using small molecules inhibiting NHEJ and HDR pathway components or by silencing NHEJ and HDR pathway components (e.g. RPA70C (SEQ ID NO: 29 and 30 sqq.), Ku70 (SEQ ID NO: 75 and 76 sqq.), Ku80 (SEQ ID NO: 95 and 96 sqq.), or DANA ligase 4/IV (Lig4) (SEQ ID NO: 53 and 54 sqq.)) on a genomic level. To pursue the latter, plasmids encoding silencing constructs for ZmRPA70C (SEQ ID NO: 183 (plasmid), SEQ ID NO: 184 (siRNA)), ZmKu70 (SEQ ID NO: 185 (plasmid), SEQ ID NO: 186 (siRNA)), ZmKu80 (SEQ ID NO: 187 (plasmid), SEQ ID NO: 188 (siRNA)) and ZmLig4 (SEQ ID NO: 189 (plasmid), SEQ ID NO: 190 (siRNA)) were co-bombarded with construct overexpressing ZmPoIQ (SEQ ID NOs: 180 (plasmid)), plasmid constructs expressing MAD7 (Plasmid SEQ ID NO: 165, MAD7 SEQ ID NO: 166 (CDS) and 167 (PRT)) endonuclease and tDTomato (SEQ ID NO: 168 (CDS) and 169 (PRT)), a regeneration booster protein (Plasmid SEQ ID NO: 170, RBP2 CDS: 171, RBP2 Protein SEQ ID NO: 172), two guide RNAs (either GEMT201 (SEQ ID Nos: 173 and 176) with GEMT202 (SEQ ID NO: 174 and 177) or GEMT201 with GEMT248 (SEQ ID Nos: 175 and 178)), that direct the endonuclease to the target site (e.g. the CWI2 promoter, see FIGS. 6 and 7) and the double-stranded DNA insert (SEQ ID NO: 179) and plasmid constructs expressing proteins that aid Pol θ activity such as ZmPARP1 (SEQ ID NO: 141 (CDS) and 142 (PRT), encoded by GEMT341 (SEQ ID NO: 181)) and ZmMre11 (SEQ ID NO: 117 (CDS) and 118 (PRT), encoded by GEMT340 (SEQ ID NO: 182)). All components were precipitated on the same gold particles. Successful editing events were determined according to the procedure described in example 3.

The application's sequence listing, which the Patent Office published only in electronic form, follows.

SEQUENCE LISTING (214 sequences)

SEQ ID NO: 1 - DNA, 7335 bp, Beta vulgaris
aaattacttaattaccatcatacagtactattcctcattaccgggacgacacactctctctttgtagaagatggcggtctttcgctcttttgaagtttgaatttcgtccctccacgctcaaatatcaaaacttcactagtacactgctccagtttcccgataatttccgatctagggttccggtaaatcaattcaattcgattatggattccgacgaacctcaaactcgtattgatcagttttttgcgtcaaagaaaaagagagctttgtcaccgaaaactgctaaagattcttctcctagtgcaaaagggtctttggaaaattacttggtgacttcacagaatgattcagtgaaaagaagtttggcattggagattgatttatcttccaaaaatgaaaagaaagagatatttcttcccagtgatggtgctactaggggtttaattttaccggaagcgattccagtggacaagtatggggcgggaaatgttggcggagcaggtaatcgggataattcagaccaagttcaagaaatcgaaaacgttgggctcaagcagtttgctctggactttttgtcattgtattgcagaagaatccaaacaagctcgctttctgagcacaaaacacatgagcataaaagatgtgggagtccatcagtgcttgctgtagaaggtacaccatcgaagagaagacactttgttgctgataaagaaaattctcagccgggtcaagagacgccaagttccgataaaggggattctgatcttgtgttgtgcagtaatgtcactcaaaaggtggaacgagatgttaactctgccttaggaccgcaaatcagcttaaggaaatgcagtaaagttacaaactcaacttcattggtggacgagtgttccacgcctgctgcaatttgtaaaagttcgagtgcacgtgaaactccggtatcaactcgtggaagctccatattttcaccaggagaagcattttggaacgaggcaatccaagttgttgatggtttgtttcctcaaactggtaacaatttttttcaagttgcagaggatactggaatcagcaagacacaagttgtagaggtttttagccattgtggtgaagggagttcaaacaataaatgcgatgtaccagttggtatttatgctagcaatactaagcaggctgaatttactattacgtcgccgaagacacacaagggaatcctagaaagagaagcatccccattgccggttaagcattttgatttctcatgtgatgacaaaaatttggacgaaagtatgcctggtcgtgtttcttcaggaaacagagaagattatagagatgcgagtgaacgtgcagtatgcaatgtagatcataagaggccactagatgacaatgctgtactgattggcagtgacgttcagtcacatgcattagcacttaaagtattggacgaaacagctcctgtttttggagctgaaaagatgaggcatagtgtagtaggtcccgacactgacaataatatctctgcttcaccaaataggaaaaatgcgaattttgtggctccgggtatgtttgatggaaatagtactccttcgagttccatgccattggaagaccggttaaacctaagcaactggctcccacctgctatttgtagcatttatagacgcaaaggaatagctaaactctacccttggcaggttgattgtcttcaaatggatggtgttttgcagaagagaaatcttgtttattgtgcatctacaagtgctggcaaaagttttgttgctgagatcctgatgttgagacgtgtcatagactctgggaaaatcgcgctgcttgtgctaccttatgtttcaatatgtgttgaaaaggcggaacatctcgaggttttgttggaaccccttggcaagcaggttcggagctattatggaaatcaaggtggcgggacacttccaaaggatacatcagtagctgtctgtactatagagaaggccaactcgttagttaacagattgctggaagaagatagattatcagaagtgggaattattgtgattgatgaactgcacatggttgctgatcccagtaggggttatctgttggagcttctattgacaaagcttcgctacggagctggtgagggtaatggggaatcacacagtggagatagctcggccacaagtagtggcaagggtgacctaactcaaggactgcaaattgttggaatgagtgctacaatgccaaacgtggcagcagttgcagactggcttcatgcagcattataccagactgagtttcgtccagttcccttggaggaatttatcaaagtgggtaacaatatctatgacaaaaagatggagattgttaggacggttcctaaattagcaaatcttggaggcaaagatccggatcatgttgtcgaattatgcaacgaggttgttgaagatggtcattctgtacttatcttctgttctagtcggaaaggatgcgaatctacagctaggcatatctcaatgtatctcaagaagttctctgccaaaatccaagaagaatcaagtgaatttgctgatgttttctcagccatcgactccttgagaagatgtcctgtgggtttagatcctgtcttggaggaaactctcccttctggtgtcgcctatcatcatgcaggtctcactgttgaggaaagagaaattgttgaaacctgttatcgtaaaggcttagtacgtgtactaactgccacatctactctagctgctggtgttaatttgcctgctaggagagtaatttttcggcaacccaagattggtcgtgactttatcgatgggacaaggtacagacaaatgtctggtagggctggtcgaaccggtatagacgcgaaaggagaaagtgtgcttatttgcagacctgaagaagttaagagaataaaagcccttctgaatgacagttgccctccattgcaatcttgtctttctgaagataaaaatggaatgactcatgctatcctggaagttgtggctggtgggattgtccaaacagctaatgatattcatcgatatgtgaggtgtacgttgcttaattctacaaaaccatttgaagatgttgtgaaatcagcacaagattctcttaggtggttatgccataaaaaatttcttgagtggaatgatgatactaaattatacagtaccactcctctgggacgagcagcttttggcagttctctgtctccagaagaatcacttattgttctggatgatctttcaagagcacgagaaggatttgtgctagcatctgatctgcatttggtttatctggcaacaccaataaatgttgaagttgagcctgattgggaactgttttatgaaagatttatggagttgtcctccctagaccagtcagttggcaaccgtgttggagttatagagccgtttttgatgcgaatggcacatggtgcacctgtacgtactgctagtcgttcaagaaatgctattaagggattgcatagcagattagatttccaactaggagtctcgaaatccaataccctctccgatgagcagtcccttcgtgtgtgccggcgattttatgttgcacttattttgtcacgattggtgcaggaactacctgttggtgaggtttgcgcagcctttaaagtagcacgaggaatggttcaatcattacaagaaaatgctggcaggtttgcatcaatggtttctttattttgtgagagacttggttggtttgatctggaaggcttggttgccaaatttcagaaccgtgtttcatttggtgtgagagcagagattgtagagctaaccactatcccatatgtgaagggatctcgagctagagcattattcaaagctggcttgcgtactcctttagcgattgctgaagcatctgtcacagaaatagctaaggctctctttgaatcattatcttgggctcaagaagatctagcacagcggcgcgttcaattgggaatagcaaagaaaattaaaaatgctgcaagaaaaattgtccttgataaagctgaggaggcgagagttgctgcattttccgcattccaatcgcttggactgaacgttccccagctttctcgtcctgtcttgttacctgcttctggtatccccattgacaatgacgaatcgaccccctcttctggagaagatagtactagtagctcgtttcatcagaaaaggaagcatatgtcagttgaattagttgaaagacaggggaatgagggtgacccaggtactgatgctggaaggccggccaaaaagttagttactagcttggaaatttccactgagagaaaggcggtcaataccctgcctagtggtgttggtgttattcgagattcttctacaccaattcaagattctgtgccagttggtgttatgacactttctccttgtttgggtcagagtgctagtgtggcatctgtaggaattgtgaataaggaagatcagagatgggagactaataatgctggcagtgatggcaataagaaactttctaatgacaagggtcccattaacatagccagcacaagcggtttggaaagcctcttggatctctgggaatctgttggagaattttattttgatattcacttcaacaaaaagtctgaagcaaattctctgcttgcttatgaagttcatggccttgccatttgctgggaagattcacgtgtgtattatgtaaatcttgcaaagattctgcaaaacagcaattttggctcatgcaacattgaatgttccggtcatgtaaacccaattgatgcgaacaatttgctattcacggagaatctcctatggaataggattagtaggttattagggagggttggagttcgaaaattcacttggaatctaaaacttcaagttaaggtgttgaaaaatgctgttctttcactgaataaaaacaacctgagtcagacattaaaaagtacaaccattgaagttgctgacggctccttctgtaagttgccccaggttattttgcaagatggaattgacctcagtatagtagcctggatcctttggcctgacgaggagagaagttctaatccgagtctcgagaaggaagttaagaggcgattatctagtgaggctgcaggagcagctaatcagagtggaaggtggaaaaatcagatgcgaagagctgcacataatggttgctgtcgtcgtgctgctcaaacacgggctctgcactctgtgctttggaaactgcttgtttctgaagaacttgttgaagcacttttgggcgtcgaacttcccttggttcatgtccttgcagacatggaggatcagggaataggcgttgacatggaaggttgcctcaaggcacgacatgtgctgagtaaaaagcttaagattctcgagaaggaagcttacaaacttgccggcatgatgttttcactgtatatgccagctgatattgccaatgtgctttatggacacttgaagctcccaatacccgagggacacaacaaagggaagcagcatgccagtacagataaacattgtttggacttgctaaggcttgagcaccctatagttccagtaataaaggagcatcggacattagcaaagctcctgaattgtacactaggttcaatatgctcgttagcaaagctgtctatgaggacacagaggtatacagtacatggtcgttggctccagacatcaacagcaacagggcgactatccatggaagaacctaatctacagtgtgttgaacatatggttgaatttagaatgcatcaaaatggtgatgcccaatgtgattctgatggtacagattataaaatcaatgcaagagacttttttatcccaactgaggaaaattggctacttgtaacagcagattattctcaaatagaactaaggttgatggctcacttctctaaggacccttctctaatcgaactactcactgatccgcatggtgatgcctttaccatgatagcatctagatggactggcaagttggaatccgttgtgagctctcaagagcgagaccaaaccaaacggctagtctatggcattctttatggcatgggcgctaatactcttgctgagcagttgaactgcagtgcagatgaagctaaggcaaaaattcaaagtttcaaaaattcattccctggtgttgcttcttggcttcatgaagctgttgcattctgccgtcaacacggatatgtgcagactcttaagggtagaaaacgcttcttatccaagataaaaattggcgacagtaaggagaaagctaaagcccagagacaagctgtgaattctatatgtcagggttcggctgctgacataattaagatagcaatgataaacatctactctgtaattgctggatgtgagacacgtagctctaatgatgcacttgtggcaaaattttccacgctcaagggccactgccgtattcttttgcaggtgcatgatgagttggttatggaagttgatccatcagttttaggagaagctgggttattgttgaagacatgcatggagagtgctgcttctctttcagtccctttacaagtgaaggtgaagtttggccggacctggggttcattggagccttttaatgtcaacgatttgcgatgaccattttttaaattcaatgtctcaattttggcggcacccagtgggaagaaattttgactgttgtgacttattgggtcgcaaagtgacgttaacatatgcaacgtgatgaaaaaaaggatctgagatgagactagatgagggctgagagatgcatgcaggtctgggaatttttgcatgcgattgtcgcatgctcttcttccaaggatgtatatgcagagtgtcttctctgaggcttcgttgcatggctgttgcgcaccataaatcttcatgacagtctacaggacttgtttggctgatatgtaaggttcctgatcggatgataattgatgcctctatcggcctgaatgtctgccgacaagtgtgtgctctctgcagatatcgaagcaacatgatactgatataatctgaggaagatgcctgtcaaagctctgaagatccgcagatgacagactcgctttcaaactcaattgtaactagtatctacttgtatattcttcccttattgggccttccatcatggttcaatttttggtgcactaacttattgcatcagagtactcatattaaccttttctttgtaattttattaataggggattctgtgacgatataaaaaaaattttgtgaaaattttcaataggattcgtattacaaggtacatctattctgtaaggattctacaattttcttattgtagctaatagaaaatatagcaaaaggttcattgaaa

SEQ ID NO: 2 - protein, 2133 aa, Beta vulgaris
MDSDEPQTRIDQFFASKKKRALSPKTAKDSSPSAKGSLENYLVTSQNDSVKRSLALEIDLSSKNEKKEIFLPSDGATRGLILPEAIPVDKYGAGNVGGAGNRDNSDQVQEIENVGLKQFALDFLSLYCRRIQTSSLSEHKTHEHKRCGSPSVLAVEGTPSKRRHFVADKENSQPGQETPSSDKGDSDLVLCSNVTQKVERDVNSALGPQISLRKCSKVTNSTSLVDECSTPAAICKSSSARETPVSTRGSSIFSPGEAFWNEAIQVVDGLFPQTGNNFFQVAEDTGISKTQVVEVFSHCGEGSSNNKCDVPVGIYASNTKQAEFTITSPKTHKGILEREASPLPVKHFDFSCDDKNLDESMPGRVSSGNREDYRDASERAVCNVDHKRPLDDNAVLIGSDVQSHALALKVLDETAPVFGAEKMRHSVVGPDTDNNISASPNRKNANFVAPGMFDGNSTPSSSMPLEDRLNLSNWLPPAICSIYRRKGIAKLYPWQVDCLQMDGVLQKRNLVYCASTSAGKSFVAEILMLRRVIDSGKIALLVLPYVSICVEKAEHLEVLLEPLGKQVRSYYGNQGGGTLPKDTSVAVCTIEKANSLVNRLLEEDRLSEVGIIVIDELHMVADPSRGYLLELLLTKLRYGAGEGNGESHSGDSSATSSGKGDLTQGLQIVGMSATMPNVAAVADWLHAALYQTEFRPVPLEEFIKVGNNIYDKKMEIVRTVPKLANLGGKDPDHVVELCNEVVEDGHSVLIFCSSRKGCESTARHISMYLKKFSAKIQEESSEFADVFSAIDSLRRCPVGLDPVLEETLPSGVAYHHAGLTVEEREIVETCYRKGLVRVLTATSTLAAGVNLPARRVIFRQPKIGRDFIDGTRYRQMSGRAGRTGIDAKGESVLICRPEEVKRIKALLNDSCPPLQSCLSEDKNGMTHAILEVVAGGIVQTANDIHRYVRCTLLNSTKPFEDVVKSAQDSLRWLCHKKFLEWNDDTKLYSTTPLGRAAFGSSLSPEESLIVLDDLSRAREGFVLASDLHLVYLATPINVEVEPDWELFYERFMELSSLDQSVGNRVGVIEPFLMRMAHGAPVRTASRSRNAIKGLHSRLDFQLGVSKSNTLSDEQSLRVCRRFYVALILSRLVQELPVGEVCAAFKVARGMVQSLQENAGRFASMVSLFCERLGWFDLEGLVAKFQNRVSFGVRAEIVELTTIPYVKGSRARALFKAGLRTPLAIAEASVTEIAKALFESLSWAQEDLAQRRVQLGIAKKIKNAARKIVLDKAEEARVAAFSAFQSLGLNVPQLSRPVLLPASGIPIDNDESTPSSGEDSTSSSFHQKRKHMSVELVERQGNEGDPGTDAGRPAKKLVTSLEISTERKAVNTLPSGVGVIRDSSTPIQDSVPVGVMTLSPCLGQSASVASVGIVNKEDQRWETNNAGSDGNKKLSNDKGPINIASTSGLESLLDLWESVGEFYFDIHFNKKSEANSLLAYEVHGLAICWEDSRVYYVNLAKILQNSNFGSCNIECSGHVNPIDANNLLFTENLLWNRISRLLGRVGVRKFTWNLKLQVKVLKNAVLSLNKNNLSQTLKSTTIEVADGSFCKLPQVILQDGIDLSIVAWILWPDEERSSNPSLEKEVKRRLSSEAAGAANQSGRWKNQMRRAAHNGCCRRAAQTRALHSVLWKLLVSEELVEALLGVELPLVHVLADMEDQGIGVDMEGCLKARHVLSKKLKILEKEAYKLAGMMFSLYMPADIANVLYGHLKLPIPEGHNKGKQHASTDKHCLDLLRLEHPIVPVIKEHRTLAKLLNCTLGSICSLAKLSMRTQRYTVHGRWLQTSTATGRLSMEEPNLQCVEHMVEFRMHQNGDAQCDSDGTDYKINARDFFIPTEENWLLVTADYSQIELRLMAHFSKDPSLIELLTDPHGDAFTMIASRWTGKLESVVSSQERDQTKRLVYGILYGMGANTLAEQLNCSADEAKAKIQSFKNSFPGVASWLHEAVAFCRQHGYVQTLKGRKRFLSKIKIGDSKEKAKAQRQAVNSICQGSAADIIKIAMINIYSVIAGCETRSSNDALVAKFSTLKGHCRILLQVHDELVMEVDPSVLGEAGLLLKTCMESAASLSVPLQVKVKFGRTWGSLEPFNVNDLR

SEQ ID NO: 3 - DNA, 7124 bp, Zea mays
gttagcgttacaggcccgtaccgccctcctctgtagtccttccctccgccactccgcggctatgcccagcaattcaaaagaaaccgaacacccttccggaaattccctcgggcaatggcgtcgggctcgtctcgcccccaaatcgaccagttcttcccggccaagaagcggaggccctcgtcgcggaagggcgagtcgccgcgacccgggacgcagcatgagagccccggcggcgccaaggggtccctggaagggtacctcgtccgttcgccttgcaaccgtgccgtggcagcggcatcggtggtccccgtgggctcgcccaggggcggggacccgggcgccaggcgtagcctctcggccgcaatggatgtcgacgtcggttcctcggcttcggtggctgcggcggcaggtgacggggcagactttgatctcaggaggagcacggcggatttcttgtcccattcctgcagtgctatcctgcctttgaggggtgactgtgattacagcgagcagtgccagatgaagcagaagcggagtgcgtcccagtcattcttggttccttgtgacaacgactatgtcaagaagcagcgagttgcccattgtggtggctttgaagctctaaaggagttagatgataatgtagcttccatgaagcaatgcatcaatcaccatggtggctcagaggctgtggaggaatctgttgagggggaacatgtgagttgtgttgggttttcggccttgcaaagatgtagctttaccccaagtactgcacagataaaagttgggttttctctagcacctgtggaaaccctaaagtctgtatcgaggaattcccttacttcacctggtgaggagttctggaatgcagcaattgaactcgctgatgggatatctgcccaggctgataaggtccgtggaaggccagaatttgatgcagcagaagacaagtcatcttgtgcagtagcagcattctttaagactcttcctagatcaggaagggatgagcttgactgtcaaaacacagtaggcagcaatgatacacatcatatagagaaattgtcaaataaagttgaatcactggcagtaaactgtcagcatataattagctcacctttgcctgtgaagcagctagatttctttcatgaggatgatattaaagtttcaggttcaaaatttgaaacaaaaggcagctatgaaacttgtaatgcacaagcagaccgtgttccactgaaaggcagtggccgcctagaaaaggaaaatctcatggaccctgtggatgtgttgaagagaagtgctattaatttgcacactgattctgcagccatgagatgtcagggtgttttcaagtcaacaactgaagggaaggttcatccaactcaagaggctgaaagagattctaatcttattaggagagatctcaatcagccaacccacaatgaaaataaatcacttgctgcatattcaaataatcgcaagacttggatagattccaagagtaaagttgcttctcaggaagtggaagctagcacacctactagctccattcctctaaaggatcactcaaagatatcaagttggcttcctcctgacctttgtgctatatacatgaaaaaaggcatttcagagctgtacccttggcaggttgaatgtttacttgtagaaggtgtcttgggcaaaaggaatcttgtgtattgtgcatccacgagtgctggtaaaagttttgttgctgaagttctgatgttgaggcagatactgtcaactgggaatatggcaattcttgtccttccctatgtgtcaatatgcgctgaaaaggctgaacatcttgaacaacttcttgagccactgggtaggcatgtccgtagcttctacggaaaccaggggggaggctcacttcctaaagatacagcagttgctgtatgtaccatagagaaggcaaactctttggtaaacaagttgttggaggatggccgcctctctgaacttggtgtaattgtcatagatgaacttcatatggttggtgaccaacatagaggatatcttttagagctgatgttgacaaagcttcgatatgctgctggtgaagggactttacagtcatgtagcggagaagtttcaagttctagcagtgggaagattgcaagtcatgggttgcagataattggtatgagtgctactatgcccaacatcgctgcggtggctgattggcttcaagctgctctttatcaaactgactttcgaccagttccactggaggaattcataaaagttggtaatcaaatatttgataaagacatgaacgttgttcgtgtccttcccaaagtagctgaccatggtggcaaggatccagatcatattgttgaattgtgtaatgaggttgttcttcagggccattctgtgcttttgttttgctccagtcgtaaaggctgcgaatcaactgcaaggcatgttgccaagttcttgaaactaccctctgttggaacaactgatgttagttcggagttttcagatgctgcagctgctattgaggccttgaggaggtgccctgctggattggatccaatattgggagaaacccttccttttggtgttgcatatcatcatgctggtcttacggtcgaggagagggagattgtggaatcatgctaccgtaaaggccttgtccgtgttctgactgccacttcaactttagctgctggtgttaacttgcctgctagacgggttatattcaggcagcccaagataggtcgtgattttattgatgggactcgctatagacagatggctggtcgtgctggtcgaactggaatagacacaaaaggagaaagtatacttgtatgcaggcctgaagaggtcaagagagttacaggtattattagaagcaattgccctcccttggagtcctgcctctcagaagataaaaatggaatgactcatgcaattatggaggttgttgctggtgggattgttcaaactgcaaatgatattcatcgttatgtgcggtgtacgctgcttaattccacaagaccttttgatgatgtcgtgaagtcagctcaagactcccttcgttggttatgccataaaagctttcttgagtggaaccatgagaccaagatatactccgctactccccttggtagagctgcttttggaagttcactcaaccctgaggaatcattggttgttcttgatgatctttcgagggcaagagaaggctttgttctggcatctgatttacatttagtttacttggtcacacccataaatgtagaccttgaacctgattgggaattatattacgagaaattcatgcaactttcttctcttgagcagtcagtaggcaatcgggttggagtaattgaacccttcttgatgcacatggctcatggggcgtcgataccttttcgtgcaaggcctgagagaaacaccgggttaagtaacaagtctgcacaagctgctggaaatactcttgttagtgagcacacaatcagagtgtctaagcgcttttatgtggctttaatgttatcgaggcttgctcaggagattcctattgctgatgtttgtgagacatttaaggtcgccagaggtatgattcaggcactgcaggaaaatgctggcaggtttgcttcaatggtttctgcattttgtcaaaggcttggttggaatgatttagaaggccttgtttcgaaattccaaaatcgtgtctcttttggagttagggcagagattgcagaactgacatcaattccatttgtcaagggttcacgtgcaagggctttgtacaagtctggtctgcgtactcctgttgccattgctgaagcatctattcctgaaattgcaaaagctctttttgaatcttctgcttggtctgggcaaggtgattctggtttacgacgaatgcaatttggtgtagcaaaaaaaataaaaaatggagcccgcaaaattgtcctggaggaggcagaagccgccagagtagcagcattctcagctttcaagtcacttggtgtggaagttccccagttcactgcacctccactcgcagctattgaggaatatccaactcacgataccatagaccaagctaagttaaataagctagcttctggtacccattctagagatgataaaaatatgaatacttgctctgattatgctactccaagggcttctacatacagtctaagaaaggacacaagtcctgctccttccattcaaatgaaagagaatgcaggactatctaaaaatgtgcaaatcactagacagggagcatcatcatctttgtcaacagaaattgctgatggatctagtagagatgtggctgaaaaaggtcctgtccatgcatataacttcccagggggatttgattgttttcttgatcaatggtccacagctagtaattttttctttgatgttcattttatcaagagatcgatgaaaccatctttgaacctttttgaagtttttgggttggctgtctgttgggaaaaatctcccatatactactgcaacttcccaaaagatctagtcactactggcaacaataacatcaaggaaatgtggggtaattttcagagaagatgggaaaaaatagcggacattatgaaacaaaagagtgtccaaaaaatgacatggaatttaaagatccagatccaggcacttaaatcaccttatatttcttgccaacggcttgaaaggtttcatcttgaccataaaatgctggacaaagttgaagtgcttaacaactcatatatgttgttatcaccagtctctgtctacaatggattggatatatgtctgctggcgtgggttctatggccagatgaggaaagcagagcggttccaaatcttgagaagtttgtcaagaggcgacttcatagtcaagaagctgctgctgcaaatcgcgatggaagatggagaaatcagatgcacaaagcagcacacaatggctgctgtagacgtgctgcacagacacgggctttgtatactgttctgaagaaattacttactcaaaatctttctgttttggttgaaacaatcgaggccccattggttaatgttcttgctgatatggagctttggggaattggcgctgacatggatgcttgtctccgtgcgaggcatattataacaaaaaagctgaaggaactagagaaagaagcttacagattggcaggcaagaatttctctctaaatgctactgctgatatcgcagacattctatatacacacctaaaattgccagttccaaaaggctgtgagaaagggaagctgcatcctagcactgacaagcagtctttggaccacctaagggatcaacaccccattatcccattaattaaggaacacagaacattagcaaaactgttaaatggcacgttgtggtccatttgttcacgtgctcaattgtgcactcaatcacaaaggtacatcatacatggaaattggcttcagacgtcaactgccactggccgtttgtccatggaggagccaaatctgcagtgtgttgagcatgtggtggaattcgatacagggaaaagcgataaagattactcaagcatttcagttgatgatcatcataaaatcaatgcccgtgattttttcatacctaccaaggagaactggttattcataactgctgattactcacagattgagttgcgtttaatggctcacttttctaaagatcatatgttggttgaacttctaaagaaacctgatggtgatgtttttaccatgattgcttcaagatgggctgagaaagaagaggccttgatttcttccaaagagagagaaaacactaaaagattcatatatggcatcctttatggaatgggtgcaaactcccttgcagaacaacttcagtgcagcactgaggaagctgcacagaaaattcaaagctttaggagattttttcctggtgtttcctcatggttacatgaagttgtgttatcctgtcgccaaaaaggatttgttgagactttattaggccggcgacgtgttcttacaaaaataacggctggcaatagcaaagagaaagctaaagcacagaggcaagcagtaaattctatttgccagggttctgctgctgatattattaaggtggctatgattagagttcattcaataattactaacagaactagtgcagctgattccacagatgaagttacaaggaaattttcagaacttggtggccagtgtcaccttattttgcaggtgcatgatgagttggtattagaagttgatccgtgcatggtagcacaggctggaaggttgttacagatatgtatggaagaagcagcttcactattggtacctttgcgcacaaagataaaggtgggaaaaacttggggttcactagaaccattccatcctgagccttgttgatgcaaatggtgaatgtcagttggatgccaatgtttcatgacatgcaaggtcctggaagaaggctgaacaatttccaatatgccccacagggaccttggtgattctgtctggtgttcttcggtagaaccttcattgctatgtctacagtcttctgtcattgctgaccgtatgtgaaatcaacgcaacagcgaccagctccattactgaggatttgctatggactggtgattatcattatgattccatgtggcatgcaagaagcatatatatatcaccaatagatgctgttaaagggtttaaggtgtatttgaaaggtcttcctagttatactgcgaatcttttagataaacccttaagaaattggagggcctagtatatggtgatttttcttttgctaggcccagcgctaaaaaaccgattatggggtttattcaaagatgaaatttcatcctgtaactacaggttcaaggtgtatttggtttgatggatatcactatggacaagcgatggttggtttttgtacaagttggatgttgataaaaatgttggtatccatgccacacaaaaaaagcctaaccagcacccatattttgtaatccttgtcaagtatgttatatggtttacttgatagctctagcgaggctatccagtacctcaccttcaccctcatatttgtaatccttgtccacataattattagtatgttatatggttatttagtaattacgatggaaatatta

SEQ ID NO: 4 - protein, 2089 aa, Zea mays
MASGSSRPQIDQFFPAKKRRPSSRKGESPRPGTQHESPGGAKGSLEGYLVRSPCNRAVAAASVVPVGSPRGGDPGARRSLSAAMDVDVGSSASVAAAAGDGADFDLRRSTADFLSHSCSAILPLRGDCDYSEQCQMKQKRSASQSFLVPCDNDYVKKQRVAHCGGFEALKELDDNVASMKQCINHHGGSEAVEESVEGEHVSCVGFSALQRCSFTPSTAQIKVGFSLAPVETLKSVSRNSLTSPGEEFWNAAIELADGISAQADKVRGRPEFDAAEDKSSCAVAAFFKTLPRSGRDELDCQNTVGSNDTHHIEKLSNKVESLAVNCQHIISSPLPVKQLDFFHEDDIKVSGSKFETKGSYETCNAQADRVPLKGSGRLEKENLMDPVDVLKRSAINLHTDSAAMRCQGVFKSTTEGKVHPTQEAERDSNLIRRDLNQPTHNENKSLAAYSNNRKTWIDSKSKVASQEVEASTPTSSIPLKDHSKISSWLPPDLCAIYMKKGISELYPWQVECLLVEGVLGKRNLVYCASTSAGKSFVAEVLMLRQILSTGNMAILVLPYVSICAEKAEHLEQLLEPLGRHVRSFYGNQGGGSLPKDTAVAVCTIEKANSLVNKLLEDGRLSELGVIVIDELHMVGDQHRGYLLELMLTKLRYAAGEGTLQSCSGEVSSSSSGKIASHGLQIIGMSATMPNIAAVADWLQAALYQTDFRPVPLEEFIKVGNQIFDKDMNVVRVLPKVADHGGKDPDHIVELCNEVVLQGHSVLLFCSSRKGCESTARHVAKFLKLPSVGTTDVSSEFSDAAAAIEALRRCPAGLDPILGETLPFGVAYHHAGLTVEEREIVESCYRKGLVRVLTATSTLAAGVNLPARRVIFRQPKIGRDFIDGTRYRQMAGRAGRTGIDTKGESILVCRPEEVKRVTGIIRSNCPPLESCLSEDKNGMTHAIMEVVAGGIVQTANDIHRYVRCTLLNSTRPFDDVVKSAQDSLRWLCHKSFLEWNHETKIYSATPLGRAAFGSSLNPEESLVVLDDLSRAREGFVLASDLHLVYLVTPINVDLEPDWELYYEKFMQLSSLEQSVGNRVGVIEPFLMHMAHGASIPFRARPERNTGLSNKSAQAAGNTLVSEHTIRVSKRFYVALMLSRLAQEIPIADVCETFKVARGMIQALQENAGRFASMVSAFCQRLGWNDLEGLVSKFQNRVSFGVRAEIAELTSIPFVKGSRARALYKSGLRTPVAIAEASIPEIAKALFESSAWSGQGDSGLRRMQFGVAKKIKNGARKIVLEEAEAARVAAFSAFKSLGVEVPQFTAPPLAAIEEYPTHDTIDQAKLNKLASGTHSRDDKNMNTCSDYATPRASTYSLRKDTSPAPSIQMKENAGLSKNVQITRQGASSSLSTEIADGSSRDVAEKGPVHAYNFPGGFDCFLDQWSTASNFFFDVHFIKRSMKPSLNLFEVFGLAVCWEKSPIYYCNFPKDLVTTGNNNIKEMWGNFQRRWEKIADIMKQKSVQKMTWNLKIQIQALKSPYISCQRLERFHLDHKMLDKVEVLNNSYMLLSPVSVYNGLDICLLAWVLWPDEESRAVPNLEKFVKRRLHSQEAAAANRDGRWRNQMHKAAHNGCCRRAAQTRALYTVLKKLLTQNLSVLVETIEAPLVNVLADMELWGIGADMDACLRARHIITKKLKELEKEAYRLAGKNFSLNATADIADILYTHLKLPVPKGCEKGKLHPSTDKQSLDHLRDQHPIIPLIKEHRTLAKLLNGTLWSICSRAQLCTQSQRYIIHGNWLQTSTATGRLSMEEPNLQCVEHVVEFDTGKSDKDYSSISVDDHHKINARDFFIPTKENWLFITADYSQIELRLMAHFSKDHMLVELLKKPDGDVFTMIASRWAEKEEALISSKERENTKRFIYGILYGMGANSLAEQLQCSTEEAAQKIQSFRRFFPGVSSWLHEVVLSCRQKGFVETLLGRRRVLTKITAGNSKEKAKAQRQAVNSICQGSAADIIKVAMIRVHSIITNRTSAADSTDEVTRKFSELGGQCHLILQVHDELVLEVDPCMVAQAGRLLQICMEEAASLLVPLRTKIKVGKTWGSLEPFHPEPC

SEQ ID NO: 5 - DNA, 6972 bp, Brassica napus
tttgaatataatagagagagagagagagaccgctctgactgtgtatagaagggaggaaatcaaaattcaaacgctacggattctcctcactccttcggcgccgtctagggttttcttctccggcggttactcttcttcctcctcctccgtccccatggattcagattcctctaggtcgcggattgaccagttttatgtttcgaagaagaggaaacacccgtcaccaaatttgaagtctgggaggaacgagaaacatgtgaaggtgactggagaaaggtctcctggagacaaaggcactttggacagttacttgaaagcatcttccctggaagatgacaagagcactaccaacagtgtgttgcaggcaaggcaggaagcgtttacgaaaaaactggatttggagcgcctgcctaaacctgccagcgctggaacttctaaaggatgtttgaaccaacagagcggatctcaagtcttggataaagaaggtgttgctacggttgcaacagatggtttgctttgtgccaaccagaaagataattcagatctaagagactttgccactggtttcttgtccttgtattgtagtgaagtgcggtctgttgttggcccacctccacatcagaatgcaaatgaacggaagcgtccaagcagttcatcactacttgctcaagatatgcaagtttctcacaagatgcgttgtgattcccaaaatataccatcactggatgaacttgcacatcctctcggtagtaagcctgaatcaatcagtgacaagagatatacatctgtttcagaacctatgcagaagattccaagcaatcaatctgctgaaatctcaatgggcttgaggaagtgtactaaggcacctgaatcatcgactcatctcactgaatgccacacgcctggatcagtcgtcaagtcacgtcctgttggaacccctaagtcaggaagcggtagcataatgttctcacctggagattctttctggaatgaagcaattctatttgctgatggtttgtcaatgccaactgaaaactctggttccgtagaagctaaagatggaggtcagaatagcgaaaaagcagataattgcagtgaaaacttaaagaaaagtttaggcttagataaaagcagagtcaacgataaagatgccattggttattcaaaggtcggggagaagcatgggagagattttaatagagaagcatctccgcttcctgtcaagaatctggaacttttgtttcaagataaaaaaacaaatggaggtacccgaaagcaatgtgcttcattggatcaaaataacattactcgaggaaacagtacggtctctgaatctgttcttgttgaaaataaaggacttggaactcttgatattgccagtaatgctcaggcaaataaacatttgataggcaggaagtatccagaacctgaaggaaagcaagttttagtgtgccaggacaatcatagtgtaagatctgtttctatgacaagcaacgtgaggaaaccagctgattctagtgaatctgaagaaagctatactccttcaagctctcatcataataaagatggtttaagtctgagcacctggcttccctcagaagtttgcagcgtatacaataagaagggaatatctaaactctatccatggcaggtcgagtgccttcaagtagatggtgttttggagaaaaggaatctggtatattgtgcttccacaagtgctggtaaaagttttgttgcagaagtcttgatgctgcgccgggtcataacaacaggaaaaatggcattgcttgtgctaccttatgtatccatttgcgctgagaaggcggaacaccttgagctccttcttgaaccacttggtaagcaagttcgtagttactttggaaatcagggtggtggaacacttcctaaaggcacttctgtggctgtctgcacgattgagaaggcaaactctttgataaatcgcttgcttgaagagggtcgtttgtctgaacttgggataattgttatagatgaattacacatggtgggtgaccaacataggggttatctgttggaacttatgctgactaaacttcgttatgctgctggtgaaggcagttcagagtctagtagtggtgagagttcagggaatagcagtggcaagactgatcctactcatggcctacaaattgtgggtatgagtgctacaatgccgaatgtcggagcagttgctgactggcttcaagcagctttatatcagacagaatttcgaccagtcccgctagaggagtatatcaaagttggtaacaccatttataataagaagatggaagttgtgaggactatacccaaagctgctgatatgggaggaaaagacccagaccatatcattgagctttgtaacgaggttgttcaagagggcaactcagtgctgatattttgctcgagtcgaaaaggatgtgaatcaactgctagacatatttcaaagctcattaaaaaagttgtcatagacgttgatcgtgaacaaagtgagtttatggatattaaatctgctattgatgccctgcgaaggtctccgtctggagtagatcctgtactagaagaaactcttccctctggggttgcctaccaccatgctggtcttacggtagaagaacgagagatagttgagacctgttaccgtaaaggtcttgtacgtgtcttaacagctacatccacactggcggcgggggttaacctgcctgcaaggagagtcatttttcggcaaccaatgattggccgtgattttcttgatggaacaaggtacaagcaaatggctggtcgagctgggcggactggcatcgatacaaaaggagaaagtgtgttgatatgcaaaccaggagaactcaagagaataatggcacttctaaatgagagctgcccacctttggagtcttgtttatctgaggacaagaatggaatgactcatgcaatattagaagttgtggcaggtggaattgttcagactgccaaagatatacatcgctatgttaggtgtactcttctgaattctacaaagccttttcaagatgtggtcaaatcagctcaggattcccttcggtggctgtgccacagaaaatttcttgagtggaatgaagagacaaagttatacactacaacaccccttggacgtggagcttttggcagttcactctgcccagaggagtcacttattgtgctggatgatcttctaagagcacgtgacggactagttatggcttctgatttgcatttggtctacttaatcacaccaattaatgttggtgttgaaccaaactgggagctgtattatgaacggtttatggaactgtctcctttagaacagtctgttggcaatagagttggagtggtcgaaccttttctgatgcgcatggcacatggtgcaacagtgcgcactctaaagaaaccacaagatgtgaacaaaaaattgcgtggagaatataacaatcggcatggttcaactagcagtaagatgctttcagatgaagagatgcttcgagtgtgcaaacgattttttgttgctctcatcttgtcaaaattagttcaggaagcttctgtgtctgaggtttgtgaagcctataaagtggctagaggtatggttcaagcgctacaggagaacgctggaaggttttcttccatggtttcggtgttctgtgaaaggcttggatggcatgatcttgaaggcttagttgccaaactccagaaccgtgtttcatttggtgtccgagctgaaattgttgaacttactagcattccatatataaagggttcaagagctagagcgttgtacaaagctggcttgcgtacatgtcaggcgattgctgaagcatccatccctgaaattgtcaaagctctctttgaaacttcagcgtgggctgaagaaggtactggacagagaaggatacacttgggattagccaagaaaatcaagaatggggcgcgcaaaattgttcttgagaaagcagaagaggcgagggctgctgcattctctgcatttaagtcgcttggtttggatgttcatgacctttcaaatcccttgccgttgcctcctgctaagagtcccaatggacaagtaactattaagagagatatctctggaggctctgttggtcctaatggactacaacatattccaggacaatcaagcatggaggggcacatggaacgtggaaactttgacacggataatcacagagaaaagccaagggacgtagcaggtactgccttaggggtttcatcagaagttaacttggccgatcctcttcctgaaatccaaccgataggaactacagttggcactgatggacctaatgctgttagttttctttctagtgatgacagagagatcaaaaatgaggataatgctgagcagcaattgaccaggagtgcccatattcctcttagcaataaggataatgcaggtgaaaagggtccactaactgcaggaaatattagtggcggatttgactctttcctgaagctctgggaatctgctgaggaatttttctttgatatccactatagtaagctacaaaatttgaattctcgcatctcttatgagatacatggaattgcgatctgctggaatagctctcctgtatactatgtaaatcttaacaaggatcttcccaatatggaatgtgaagaaaacgaaaagcttttcaaggatgcagttattgacaagaaagaggttttgggtacccaaaacatgcttgatgttattaaagctaggtggaacagaatcagtaaaataatggggaatgaagaaaagagaaagttcacttggaatttgaaaaaccagattcaagttctcaagagtcctgccatttcaatccaaagatgcgctcgcctgaatattgcagaagtggtcagggaccatgagttggtggatggatcttggttggtgatgcttccacttcgcataagccacaccattgacatgagcatcgtgtcatggattctttggccagatgaggaaagacactcaaatccaaacatagataaggaggtaaagaaaagactgtccccagaggcagctgaagctgcaaatcgcagtggcaggtggaggaatcagatccgaagggttgcccacaatggctgctgcagacgggttgctcaaacgcgagccctttgttcagctctttggaagatccttatttcagaagaacttattgaagcactgacaaccactgaaattcctctggtcaatgtccttgcagacatggagctctggggtataggcgttgatatagagggatgtcttaaggcaaggaatgtattgcgggataaactgcggtcccttgagaagaaagcatttgaattagctggcatgacattttcattgcacagcccagctgatatttcaaatgtgctgtttcgacagctgaagttgcccataccggaaaaccacaataaagggaaacttcatccaagtactgataaacattgcttggatctattaaggaatgagcatcctgttgtcccagttatcaaagagcaccgcactttggcaaagctcttaaattctacacttggatcaatttgttcgcttgctaagctacgcttaagcacgcaaaggtacactctgcatggccactggcttcaaacatccacagcaactggaaggctttccatagaggagcctaatctccaatctgttgagcacgaagtagagtttatattggataaaagtggaaaggaagatcgctacaaaatcaatgcacgtgatttctttgttcctactcaggaaaattggctactcttgacggcagattattcacagatagagttgcgacttatggcacatttttctagagattcctcgttgattgcacagctcagtcagccagaaggtgatgtctttacgatgatagctgcaaaatggactggaaagaccgaggatactgttggtccacatgatagagaccagaccaaaagattgatatatggaattctttatggaatgggtgccaacacgcttgctgaacagcttgagtgcagctcagatgaagccaaggagaaaattagaagctttaaaagttctttccctgcagtcacgtcttggcttaacgaaacagtttccttttgccaggaaaaaggatacattcagactctcaagggaagaaggcggttcttgtcgaaaattaaatttgggaatgccaaagagaaatctaaggctcaaaggcaagctgtaaactccgtgtgccagggatctgctgctgatataatcaagattgcgatgataaacatatattcagctatttctgaggatgttaatacttcagcatctagttcttcaactgaggctaggtttcacatgttgaagggacgatgccgaattcttctacaggtacatgatgagctcgtgctggaagttgatccttcttacgcaaaagaagctgcaatgttgctacaatccagcatggaaaatgcggtttcacttctcgtccccctacatgtgaagctgaagattgggaaaacatggggttctttagagccgcttcaggctgattaaagacatcagcaaaatatcagtgtctttaaatcgcagcttaagagcctcggattgtttgagcaactcgctcacatgtgtattttatggctcaaaatgctcccacattcaccacagcttgactcaacggtatgctctgtttcatcttcaagtgatgaagataaatgatatcagtggctgcttctttgtgacattcatcgcttgaatatggaggtggagaggaacggaccattccaaagggatatttgctcctgctgtgttctgagggctcttcgttttagcttcaaagagagtctgtaaagtaccattaagagtttccacagttttacttagacagtgacttttgacataaccaaaaatcatatagaaagattaggaaaagttttctctctttttcactgtaaatactctaatgtttttatcaatatgatgtgctcattgat

SEQ ID NO: 6 - protein, 2125 aa, Brassica napus
MDSDSSRSRIDQFYVSKKRKHPSPNLKSGRNEKHVKVTGERSPGDKGTLDSYLKASSLEDDKSTTNSVLQARQEAFTKKLDLERLPKPASAGTSKGCLNQQSGSQVLDKEGVATVATDGLLCANQKDNSDLRDFATGFLSLYCSEVRSVVGPPPHQNANERKRPSSSSLLAQDMQVSHKMRCDSQNIPSLDELAHPLGSKPESISDKRYTSVSEPMQKIPSNQSAEISMGLRKCTKAPESSTHLTECHTPGSVVKSRPVGTPKSGSGSIMFSPGDSFWNEAILFADGLSMPTENSGSVEAKDGGQNSEKADNCSENLKKSLGLDKSRVNDKDAIGYSKVGEKHGRDFNREASPLPVKNLELLFQDKKTNGGTRKQCASLDQNNITRGNSTVSESVLVENKGLGTLDIASNAQANKHLIGRKYPEPEGKQVLVCQDNHSVRSVSMTSNVRKPADSSESEESYTPSSSHHNKDGLSLSTWLPSEVCSVYNKKGISKLYPWQVECLQVDGVLEKRNLVYCASTSAGKSFVAEVLMLRRVITTGKMALLVLPYVSICAEKAEHLELLLEPLGKQVRSYFGNQGGGTLPKGTSVAVCTIEKANSLINRLLEEGRLSELGIIVIDELHMVGDQHRGYLLELMLTKLRYAAGEGSSESSSGESSGNSSGKTDPTHGLQIVGMSATMPNVGAVADWLQAALYQTEFRPVPLEEYIKVGNTIYNKKMEVVRTIPKAADMGGKDPDHIIELCNEVVQEGNSVLIFCSSRKGCESTARHISKLIKKVVIDVDREQSEFMDIKSAIDALRRSPSGVDPVLEETLPSGVAYHHAGLTVEEREIVETCYRKGLVRVLTATSTLAAGVNLPARRVIFRQPMIGRDFLDGTRYKQMAGRAGRTGIDTKGESVLICKPGELKRIMALLNESCPPLESCLSEDKNGMTHAILEVVAGGIVQTAKDIHRYVRCTLLNSTKPFQDVVKSAQDSLRWLCHRKFLEWNEETKLYTTTPLGRGAFGSSLCPEESLIVLDDLLRARDGLVMASDLHLVYLITPINVGVEPNWELYYERFMELSPLEQSVGNRVGVVEPFLMRMAHGATVRTLKKPQDVNKKLRGEYNNRHGSTSSKMLSDEEMLRVCKRFFVALILSKLVQEASVSEVCEAYKVARGMVQALQENAGRFSSMVSVFCERLGWHDLEGLVAKLQNRVSFGVRAEIVELTSIPYIKGSRARALYKAGLRTCQAIAEASIPEIVKALFETSAWAEEGTGQRRIHLGLAKKIKNGARKIVLEKAEEARAAAFSAFKSLGLDVHDLSNPLPLPPAKSPNGQVTIKRDISGGSVGPNGLQHIPGQSSMEGHMERGNFDTDNHREKPRDVAGTALGVSSEVNLADPLPEIQPIGTTVGTDGPNAVSFLSSDDREIKNEDNAEQQLTRSAHIPLSNKDNAGEKGPLTAGNISGGFDSFLKLWESAEEFFFDIHYSKLQNLNSRISYEIHGIAICWNSSPVYYVNLNKDLPNMECEENEKLFKDAVIDKKEVLGTQNMLDVIKARWNRISKIMGNEEKRKFTWNLKNQIQVLKSPAISIQRCARLNIAEVVRDHELVDGSWLVMLPLRISHTIDMSIVSWILWPDEERHSNPNIDKEVKKRLSPEAAEAANRSGRWRNQIRRVAHNGCCRRVAQTRALCSALWKILISEELIEALTTTEIPLVNVLADMELWGIGVDIEGCLKARNVLRDKLRSLEKKAFELAGMTFSLHSPADISNVLFRQLKLPIPENHNKGKLHPSTDKHCLDLLRNEHPVVPVIKEHRTLAKLLNSTLGSICSLAKLRLSTQRYTLHGHWLQTSTATGRLSIEEPNLQSVEHEVEFILDKSGKEDRYKINARDFFVPTQENWLLLTADYSQIELRLMAHFSRDSSLIAQLSQPEGDVFTMIAAKWTGKTEDTVGPHDRDQTKRLIYGILYGMGANTLAEQLECSSDEAKEKIRSFKSSFPAVTSWLNETVSFCQEKGYIQTLKGRRRFLSKIKFGNAKEKSKAQRQAVNSVCQGSAADIIKIAMINIYSAISEDVNTSASSSSTEARFHMLKGRCRILLQVHDELVLEVDPSYAKEAAMLLQSSMENAVSLLVPLHVKLKIGKTWGSLEPLQAD

SEQ ID NO: 7 - DNA, 6339 bp, Helianthus annuus
atttcaaaccatagttttgaaataatcccgtctccatagttgcttaaaatggagcatcgaaagaattggcggtcttgaattgagttcaaaccctttgaacatggtattacatatgaactaactagggctcaatcgcctgaacaacaactaatctcgaaaaaaatggcgtcagatggttcatcccgctcccgtgttgaccagtttttttcttcaaagaaaaagaaaaagttcgtatcacctctttcaaaatcagggaaagttgaacctgatgcaaaactttcagtcgacgggtctcctagtgccaagggttctttatccaactatttggtttcttcacaaaatgaagctcgtaaccttagcactgtacccacagctcgtgggccatccgataatcaagatcaagtgagaagaaatctgacgtcagcaattgaatcatccaattctgtgcatggcgttgagaaccccgagctacaacagtttgcaactaattttttgtcatattattgtagcgatcttcccactacacaagttaatgcacataaacggcccggtagtccatctgtgagagatttggaagataaattgattaataaacgacatatcagtagtgtcggaaacccgagccatgacgaggagcatcaaacgagcttgaggaaatgcaatagaacatccacggaagttgctgacatggcgttatgcaatacaccgagcctgacaactgtcaaagttggcggtgaagaaacaccgcagtcaatgcgtggaagctcgatgttttcaccaggagacacgttctggaaagaggcaatccaggtggctgacggtatgtccaaggcaaatgcagacttggcatcttcagggcaaaatggtaattctatcgacaaagaagtgtcaccgttaccggtgaagcattttgatttttcatgcgaggataaacgtatggttgtggatgctccaattatgagcaccccttgcaaccaagttcaatctttgtgtaaattgcaagacacaaattcgagttgtgtgattactaaaaggagaagtgatgatataagtccacctaatgataacagaatgtcgatatcaccaaacacagacatcaaaagttataacgtgaacggtttaaacagtgtagataatactccgtcaagctcacttcctcctaacgaccgtttagatattagtaattggctcccttctgaaatatgcaaaatttataaaaggcggggaatatcgaaactttatccttggcaggtggactgtcttcaggttgacggggtgttacaaaaaaggaaccttgtatattgtgcatctacaagtgctggcaaaagtttcgttgcggaaatattaatgttacgccgagtattatcaacgagaaaagtggcacttcttgttcttccttatgtatcaatttgcgcagagaaggcagaacatcttgaagccttactggaaccacttgataaacacgttcgtagttattatggaagccaaggtggtggggcccttcctaaagatacatccgtagccgtttgcacaattgagaaggcaaattctctactcaatagattgcttgaagaagggcgtttgtcggaagttgggatcatagtaattgatgaacttcacatggtgggagatcagcacaggggctatctcttggagcttatgctgacgaagcttcggtacggagctggtgaaggccgggtagaattttcgagcggagaaagttccggaacaagcagcgggaaaatggaccccactcacggtctccaaattgtcgggatgagtgccaccttgcccaatgttggtgcggttgctgactggcttcaagcagcgctataccaaacagattttcgacctgttccgcttgaggagtatataaaagtgggtaactcaatttataacaaaaagatggaacttgtaaggatgattccaaaacgggctgatcttggtggtaaagatcctgataatatcattgaattatgcaatgaggttgtacaagagggccactcagtgttgatattttgctccagtcgtaaaggatgtgaatcaactgctaagcatgttgcaaagtacctcaagagtttttccatgaatgttaacggtgaaaatgaatatcccgatgttgcttcggctatcgatgcattgaaaaagtctcccgcagggttagatcccgtactttctgaaacgcttcctgctggtgttgcctatcatcatgctggtctcacagttgaagaaagagaagtagttgaaaactgctaccgtaaaggtctagtacgcgtcttaacagctacatccaccttagcagctggagtgaatctacccgcaagacgagttatcttccgacaacctaggattggtcgggattttatagatgggacaagataccgacaaatgtctggacgtgcgggtcgcaccggaatcgatacaaaaggagagagtgtgctaatatgcaaacccgaagaagtgaaaagaattgtggcactcatcggtgacagctgtccaccgttgcattcttgtttatcagaagataagaatggaatgacacatgcaatattagaagttgttgctggtggaattgttcaaacggctaatgatatccatcgttacgttagatgcactcttttaaattcaacacaaccatttgaagatgttgtaaaatcagccaaagattcgttaaaatggctgtgccataggaagtttctggaatggagtgaggaaactaagttgtatagtaccacaccccttggccgtgcttcttttggcagctctctctgtcccgaagagtcacttattgttctggatgatcttacaagggcaagagaaggatttgtgcttgcctctgatttgcacttagtttacttagtaacaccgattaacgttgacgttgaacccgattgggaactgtactatgaaagattcatgcaaatgtcagctcttgatcagtctgttggaaaccgtgttggagtgcaagaaccgtttctgatgcgtatggcccacggagctccaattcgcagttcagaaagatctagacatgatttaaaagggctcggggtgtcaaccaacggcatgcttacaaatgatcaaatgcttcgtgtctgtaaaagattctacgttgcactaatcttgtcaaaacttgtacaggaagtacctgttgcagaggtttgtgaagcgttcaaggtggctcgtggaatggttcaatctttgcaagaaaacgcgggacgattcgcatctatggttgctgtgttttgtgaaagattaggttggcatgatctcgagagcttgtttgcgaaattccaaaatcgtgtttcgtttggtgtaagagcagagatcgctgagcttaccaccattccgtatgtaaagggtgctcgagctagggcactttataaagctggccttcgtactccccaagcaattgctgaagcatctgtgctcgaaattgctaaagcgatttttgaatcttcatcatgggatgcacaagaaaacacggcacagaaacgtattcaactgggagtggccaagaagataatgaacggtgcgcgtaagattgttctggataaagccgaagaagcaagggctgctgctttttcagctttcaaggctcttggagtcgacgttcctcaattttctcttccaaaattaccctcagcttccgtgaactttactaaaaacgagccagtgacttcttcacgagaagacacgaccagtagtgattgtgtgaaccaaaaagatataaaatcaaataccacgggactaacggaagcaaaaccgtctaatgccggtttaatgacatcagcagaagaaaattcagacgataccaccttaagtaaatcaggcgctgacatcactgttataaaggtagaaaaaccatgcgatgttggtttagcgacatcagcagaagaaaactctgacgataccacgttaagtaactcaggtgctgacatcactgtaatgaaacacaacggtgttgatgaaaatcaaaatcttcccgagaaagagcatatacgagtcggtaacaaagaaagaacctctgagaagggtccaacaagtgcagtcagcatgccaggtggattcgattcgtttttggatatgtgggacgcaacacaagaattcttttttgatattcatttcaacaaacggtctgaatttaacacaatcgcgccgttcgaattacacggcattgcaatctgctgggaagattctcctgtttactatattagtatccccaaggacttattctcgtcggacaacaaaataatcaagaacccgatcggtaatattaatcttgaggtggcgatacaaagatgggctagaatcggtatgataatgggaaagagtcgagttagaaaattcgggtggaacttaaagattcaaaatcaagtgttgaaacatcccgcagtttctattcagagatttggcagtttgactcatacggtgaaaactattggtgtggagctcgttgacaacagttactatatgttctctccggttcatcttaaagaggctgttgatttgtcggttgttgtttggattctttggcctgatgatgagagaagttctaaccctaatttggaaaaggaaatcaagaaaaggttacctggtgagatggcagcagctgctaaccagaagggccgatggaaaaatcaaatgcgcagagccgcgcataacggttgctgtaggcgcgttgctcaaacacgcgctttgtcatctgttctctggaagttgctaacatctgagaatcttctagaaccattagtaactactgagatgccactggtaaatgttcttgctgacatggaactttccggaataggcgttgacatggacggttgcattcagtcacgccatgttgtggctaaaaaactaagataccttgaaaacgaagcctataggctggcgggtacacggttttcgttatatacatcagcagatattgcagatgtactttatacaagattaaagttaccagttcctgaaggttatgaagggaaaaatcaccctagtactgacaaacattgtttggaaatgctaaggcttgagcatcctataattcctattattaaagaacaccgtacgctggccaaactcttgaactgtacgctaggttcaatgtgttctcttgcaaagttatcaatgaagactcaaagatatacgcttcatggacattggctccaaacttcaactgcaaccgggcggttatccatggaggaccccaatcttcagtgtgttgagcacatggttgaattcaagattgaccgtgatgaaaacgagactgacggttcaaacacagatcactacaaagtaaatcctcgtgatttctttattccaactcaggaaaactggttactagtaacggcagattattctcagatagaactgagattaatggctcatttctccaaagacacgtcactaattgagctccttacaaaaccttctggtgatgtgttcaacatgattactgcaaaatggaccgggaaagctgagtcatcagtggaccctacagaacgagatcaaaccaagcggttggtttatggaattttatatggtatgggtgcaaattcgcttgcggaacaactggaatgcagtccggatgatgctaatgaaaaaattcagagctttaaaaggtcgtttcccggtgtttcttcttggcttaaagaagccgtagcagaatgccgcaaaaaaggttacgtggaaactttaatgggaaggaagagatttttggcaaaaataaaatttggaaataccgaagaaaagtcaaaagctcagagacaagctgtgaattccatttgtcagggatccgcagctgatattattaaagttgcaatgataaccatacattcagtcgtaggtgatggtgttgaaaagtcaaagtccagtgtcgaatttgcagaaagattccacatgcttaagggtcgttgtcgaattcttctacaggtacatgatgagttaatacttgaagccgatccttctgttatgaatgaggctggaatgctactaaaattgagcatggaaagtgctgcctcccttctagttccgctgatcgtcaagctgaaacgtggacgaacatggggatctttagaaccggtactgcctagttaggtacaacaaactacattaaagtatgctaagatgcccgcttacaccgaattcacttattttatgtttgatatattcagtagaaattacaccatttctattctggaaaaagttttcattttagaaatatttatttgtcatggaaaataggaatttgttgtataagaaacatgaagaaatgataatagaaaaagtcaatgccgttggtttttgaaaactttggtgggaaaaaaggtttgatgttta

SEQ ID NO: 8 - protein, 1977 aa, Helianthus annuus
MASDGSSRSRVDQFFSSKKKKKFVSPLSKSGKVEPDAKLSVDGSPSAKGSLSNYLVSSQNEARNLSTVPTARGPSDNQDQVRRNLTSAIESSNSVHGVENPELQQFATNFLSYYCSDLPTTQVNAHKRPGSPSVRDLEDKLINKRHISSVGNPSHDEEHQTSLRKCNRTSTEVADMALCNTPSLTTVKVGGEETPQSMRGSSMFSPGDTFWKEAIQVADGMSKANADLASSGQNGNSIDKEVSPLPVKHFDFSCEDKRMVVDAPIMSTPCNQVQSLCKLQDTNSSCVITKRRSDDISPPNDNRMSISPNTDIKSYNVNGLNSVDNTPSSSLPPNDRLDISNWLPSEICKIYKRRGISKLYPWQVDCLQVDGVLQKRNLVYCASTSAGKSFVAEILMLRRVLSTRKVALLVLPYVSICAEKAEHLEALLEPLDKHVRSYYGSQGGGALPKDTSVAVCTIEKANSLLNRLLEEGRLSEVGIIVIDELHMVGDQHRGYLLELMLTKLRYGAGEGRVEFSSGESSGTSSGKMDPTHGLQIVGMSATLPNVGAVADWLQAALYQTDFRPVPLEEYIKVGNSIYNKKMELVRMIPKRADLGGKDPDNIIELCNEVVQEGHSVLIFCSSRKGCESTAKHVAKYLKSFSMNVNGENEYPDVASAIDALKKSPAGLDPVLSETLPAGVAYHHAGLTVEEREVVENCYRKGLVRVLTATSTLAAGVNLPARRVIFRQPRIGRDFIDGTRYRQMSGRAGRTGIDTKGESVLICKPEEVKRIVALIGDSCPPLHSCLSEDKNGMTHAILEVVAGGIVQTANDIHRYVRCTLLNSTQPFEDVVKSAKDSLKWLCHRKFLEWSEETKLYSTTPLGRASFGSSLCPEESLIVLDDLTRAREGFVLASDLHLVYLVTPINVDVEPDWELYYERFMQMSALDQSVGNRVGVQEPFLMRMAHGAPIRSSERSRHDLKGLGVSTNGMLTNDQMLRVCKRFYVALILSKLVQEVPVAEVCEAFKVARGMVQSLQENAGRFASMVAVFCERLGWHDLESLFAKFQNRVSFGVRAEIAELTTIPYVKGARARALYKAGLRTPQAIAEASVLEIAKAIFESSSWDAQENTAQKRIQLGVAKKIMNGARKIVLDKAEEARAAAFSAFKALGVDVPQFSLPKLPSASVNFTKNEPVTSSREDTTSSDCVNQKDIKSNTTGLTEAKPSNAGLMTSAEENSDDTTLSKSGADITVIKVEKPCDVGLATSAEENSDDTTLSNSGADITVMKHNGVDENQNLPEKEHIRVGNKERTSEKGPTSAVSMPGGFDSFLDMWDATQEFFFDIHFNKRSEFNTIAPFELHGIAICWEDSPVYYISIPKDLFSSDNKIIKNPIGNINLEVAIQRWARIGMIMGKSRVRKFGWNLKIQNQVLKHPAVSIQRFGSLTHTVKTIGVELVDNSYYMFSPVHLKEAVDLSVVVWILWPDDERSSNPNLEKEIKKRLPGEMAAAANQKGRWKNQMRRAAHNGCCRRVAQTRALSSVLWKLLTSENLLEPLVTTEMPLVNVLADMELSGIGVDMDGCIQSRHVVAKKLRYLENEAYRLAGTRFSLYTSADIADVLYTRLKLPVPEGYEGKNHPSTDKHCLEMLRLEHPIIPIIKEHRTLAKLLNCTLGSMCSLAKLSMKTQRYTLHGHWLQTSTATGRLSMEDPNLQCVEHMVEFKIDRDENETDGSNTDHYKVNPRDFFIPTQENWLLVTADYSQIELRLMAHFSKDTSLIELLTKPSGDVFNMITAKWTGKAESSVDPTERDQTKRLVYGILYGMGANSLAEQLECSPDDANEKIQSFKRSFPGVSSWLKEAVAECRKKGYVETLMGRKRFLAKIKFGNTEEKSKAQRQAVNSICQGSAADIIKVAMITIHSVVGDGVEKSKSSVEFAERFHMLKGRCRILLQVHDELILEADPSVMNEAGMLLKLSMESAASLLVPLIVKLKRGRTWGSLEPVLPS

SEQ ID NO: 9 - DNA, 6395 bp, Hordeum vulgare
ggaatacgttcctcagccctcggagcaccaagagtatagaaggagagagcacccacccacctgaatcgctcgctcctgcccaagtttcaaaccaaaaaccgcaccgccgccccccttccgcaatggcgtcgggctcctcccgaggtcacgtcgaccagttcttcgcggccaagaagcggaggccctcgtcgcagcatgggagccccggggccgccaaggggtccctggcggggtacctggtccggtcccctcccgccgccgcggcggcgtgctcgtcggctgccctggctggctccccctcaggcgcccggaggagcctcgcggcgtccatgaactccgacatcgccaattccgccgcggcgatgaatgtcgatgcgggcaattccgcggcgccggcgacggactacggggacgacctggagatgaagcggttcaccatggagttcctgtcccattactgcagtgatatcccgtctgttatgatgtctgacgctggcaagggcgaaccagacaagaatcagaagcggggcgcgggcaactcgttcctggctccgtgcggtgatagatctgccaagaagcagtgcgtttctcgttgtggagccgacgaagttccaagggttaaggaattaggcgataacatgcccttgaaatgggtcggtaatcgcggtgcttcagaacctcttgagggatttggggccttgcaaaggtccagctttactccaaatgctgcgcagaaaattgctgggttttctgcagcacctggggagaccccaaaatctgcatcctccctggtatcaccaggggaggacttctggaatgccgcaatggaatttgctgatggcgtctctgctatggctcacaagggtcctcgaaggcgacactgtgatgcggcagcggacaagtcgtcctgtgcagttgcactgggttctaagactcttcctagatcaggaaatgaggaatttaactgtgaaaatacagtaggcagcaatcctatgaagcagatagacacgttcccaaatacatcagaattagcagtgacaaatagacagcataaaaacaactctcctttgcctgtgaagcatctggatttctttcatgaggatgcaattcaagtttcaggcttggaaggtaaagaaaaaggtggcactgttcctggaagtgcacaagtgaaccagggtcgaccgaaggacagtagcttttatagaacggaaaacctcatgcgttctgtagatgacacgaagacaattacttttaatccagacgtcggttctacggtcatgattcctggtgaaggtttgttcgagtcaaaaactgcagggatgggtcattcaattgatgtcggagtcagaggttcttgtatgattaagagtgacctcaatcaactgacccatggtaaggctaaattgcctgctgcaaattcgaattcttgcaagcctaacagagattccaagagtaagtttgcttctcaaagagtggaagcttgcactcctaccagctctgttcctctaaaggatcattccaagctctcaagctggctccctcaggagctttgtgctatatacatgaaaaaaggcattccacagctatatccatggcaggtggaatgtttacttgtggatggtgtcttggagaatcgcaatcttgtatattgcgcatctacgagtgctggtaaaagttttgttgctgaagttctgatgttgagacggatattgtccagtcaaaagatagcaattctagtccttccgtatgtttcattatgtgctgaaaaggctgaacatctcgagcaacttcttgccccactgggtaagcatgtccgtagctactatgggaatcaggggggagggtcacttcctaaggatacatcagttgctgtgtgtaccatagagaaggcgaattctctggtaaacaagttgttggaggatggccgcctttctgaacttggtataattgtaatagatgagcttcatatggttggcgatcagcacagagggtaccttttggagctgatgctcacaaaacttcggtatgccgctggtgaaggaaattcagagtcatctagtggagaaacttcaggttctagcagtggcaaggcgggtgccacccatggattacagattattggtatgagtgctactatgcccaacgttgcagctgtagctgactggcttcaagccgcactgtatcaaactacctttcgacccgtcccattggaggagtttatcaaagttggtaatcaaatatttgataaagacatgaatattgtacgcgtacttcctaaaatagctgatattggtggtaaggatccagaccatattgttgagttgtgcaatgaggttgttctggagggtcattctgttcttttgttttgctccagccgaaaaggctgtgaatcaactgcaaagcatattgcgaagttcttgaaagtagctaatgttggttcaaaagaagttagctcagagttccgagatgttgcatctgcagttgaagccttgaagagatgtcctgctgggttagatcctgtattggaagaaacccttccatttggtgttgcataccaccatgctggtctcacggttgaggagagagacattgtggaaacatgctaccgcaaaggccttgtccgagttttgactgccacatcaactttagctgctggagtaaacttgcctgcgaggcgagttatattcaggcaacctaggataggtcgtgatttcattgatgggactcgctatagacagatggctggtcgcgctggtcgaactggaatagacacaaaaggagagagtatacttgtatgtaggcctgaagaggtaaagaggataacaggtattgttagaagtgattgcccccccttgcagtcatgcctctcagaagacaaaaatggaatgactcatgcaattatggaggttgttgctggtgggatcgtgcaaactgcaagtgatattcatcgatatgtgaggtgtacgctgcttaactccaccaaatcttttgacgatgtcgtaaagtctgctcaagactcccttcgttggttatgccataaaagatttgttgagtggaacaatgacaccaagatatactccaccactccacttggacgagcatcttttggcagttctcttaatcccgaggaatcactggttgtgcttgatgatctttcaagggcaagagaaggttttgttctggcatctgatttgcatttagtctacttggtaacccccataaatgtggaagttgaacctgactgggaattatactatgagaggttcatgcaactgtcttctcttgagcagtcagttggcaaccgggttggagtaacagaacctttcttgatgcacatggcccatggggcagcaatgcctattcgcggaaggcccaagagaaatactagtggaggttctggtgtaaacactcttattaatgaccagtcacttagagtatctaagcgcttttatgtggcgttgatgatatcaaggctggctcaggagattcctgtcacagatgtttgtgaatcatttaaagttgccagaggtacgattcaagctttgcaggaaaatgctggcaggtttgcttcaatggtttctgccttttgtcagagacttggttggcaggatttagaaggtcttgttgccaagttccaaaaccgtgtctcgtttggagttagggcggagatcgcagaacttacaacaattccattcgtcaagggctcacgtgcaagggctctttataactctggtttgcgtacccctgttaccattgctgaagcatctattcctgaaatcgcaaaagctcttttcgaaaactcttggtctggtcaagatgattctggtttacggcgaatgcaattcgttatagccaagaaaataaaaaatggagctcgtagaattgttcttgaggaggcagaagcagccagagtagcagcattctcagctttcaagtcacttggggtagaagttcctcagtttaccacacctctgctcccagctagtgaggactctccacctcgagaggccatggtatttcctagtgcaggtcatgctaagtgccaagagtcagttttaggggcacgtgatggtgatgaaagaaacatctgctctgattatgttgctcaaagggcttctacagagattgtaggggaggatatgcaccctgtttctaccattcatattaaagagagccaaggaatagcaaatagtgtcaaccttgctagtatgcaagaagcatcacctttatcgacgttgcccagcagaaatgtggctgacagaggtcctgtcaatgcacataacttccctggagggtttgatggtttccttgatcaatggtcttctgttaatgaattttcttttgatcttcattttgttaagaaatcaagtaaactatctttgaccatttctgaaattcttggggtggctgtttgttgggaaagttcacccgtctactactgcaatttcccaaaagacctaaccccaactggcaacaataattctgttgaattgtgggaaggatttaggagaagatggagtagaatagttggcattatgcagcaaaagagtgtcaagaaaatgacatggaatttgaagatccagattcaggcacttaaatctccctgtgtttcttgtcaacggctttctaggcttcaccttgaccctaaaacattgaacaatattgaagtcctagacagcacatatgtgttattaccaccaatctctgtctataatgggttagacatatgcttggtggcatggattctctggccagatgaggaaagcaaaacagtgccaaacctcgagaagttagtgaagagacggctacctagtgaggctgcagcagcagcaaatcgggatggcagatggaggaatcagatgcacaaagcagctcacaacggttgctgtaggcgggctgcacagacaagagcactgggttctgttttgatgaagttgcttgtttctcaaaatctcagtgatttgattgaaacagttgagggtccattggtaaatgttcttgctgatatggaattatggggagttggtgctgacatggatgcatgtctccgtgcgaggcatattataataacaaggctgaaggagctagacaaagaagcatacaaattagtgggcaagagtttctcactaaatgcaaatgctgacatcgctgacattctttttactcacttaaaactgccagtaccaaaagggtgcgagaaagggaagttgcatcctagcactgacaagcagtgtctggaccatctaagggatctacacccaattgtctcagtaattaaggaacatagaacattggccaaactgttgaatggcacattggggtccatctgttcacgggctaagttgtgcatccaatcccaaaggtacatcatacatggaaattggcttcagacatcaactgctactggccgtctatcaatggaagagccaaatcttcagactgttgagcacatggtgaatttcacaacaggaaagaatgataaagatttcacaagcatgtcaatggttgatcgtcatgaaatcaatgcccgtgaattttttgttcccactcaagacaactggttgttggtaactgccgattactcccagatagagctgcgttttatggcgcatttttctaaagatcctgtattgatcgagcttctaagtaaaccagatgttgatgtgtttactatgattgcctcaagatggagtggcaaagaagagtctttggtctcttctaaggaccgagataacacaaagagatttatttatggcatcctttatggaatgggctccaactcccttgcagaacaacttgaatgcagcccagctgaagctgcacagaaaattcaaagtttcaagagattctttccaggcgtttcttcgtggctacaacaagctgtggcatcatgtcgccaaaaaggatatgttgaaaccttgatgggacggagacgttttcttacaaagattaccgctggaaatagcagagagaaagctcaagcacagagacaagcagttaattctatttgccagggttctgctgctgatattatcaaggtggctatgcttaaggttcattctgtaataaccaatgggagtaacacagttgattccatggatgggcttacgcaaaacttttcacaaatcagagggcgttgtcaccttcttttgcaggtgcatgatgaacttgtgcttgaagttgacccgtctatggtggcagaggctgtaaggctgctacagataagcatggaaactgcagcttcactcttggtacctttacgcgctaaagtgaaggttggaaaaacatggggttcacttgagcctttccacccagagccttgatgctgaactacccaggaaatcacatttttcctcttttgtcaagaccaatagccattgccatcataaagctgg

SEQ ID NO: 10 - protein, 2066 aa, Hordeum vulgare
MASGSSRGHVDQFFAAKKRRPSSQHGSPGAAKGSLAGYLVRSPPAAAAACSSAALAGSPSGARRSLAASMNSDIANSAAAMNVDAGNSAAPATDYGDDLEMKRFTMEFLSHYCSDIPSVMMSDAGKGEPDKNQKRGAGNSFLAPCGDRSAKKQCVSRCGADEVPRVKELGDNMPLKWVGNRGASEPLEGFGALQRSSFTPNAAQKIAGFSAAPGETPKSASSLVSPGEDFWNAAMEFADGVSAMAHKGPRRRHCDAAADKSSCAVALGSKTLPRSGNEEFNCENTVGSNPMKQIDTFPNTSELAVTNRQHKNNSPLPVKHLDFFHEDAIQVSGLEGKEKGGTVPGSAQVNQGRPKDSSFYRTENLMRSVDDTKTITFNPDVGSTVMIPGEGLFESKTAGMGHSIDVGVRGSCMIKSDLNQLTHGKAKLPAANSNSCKPNRDSKSKFASQRVEACTPTSSVPLKDHSKLSSWLPQELCAIYMKKGIPQLYPWQVECLLVDGVLENRNLVYCASTSAGKSFVAEVLMLRRILSSQKIAILVLPYVSLCAEKAEHLEQLLAPLGKHVRSYYGNQGGGSLPKDTSVAVCTIEKANSLVNKLLEDGRLSELGIIVIDELHMVGDQHRGYLLELMLTKLRYAAGEGNSESSSGETSGSSSGKAGATHGLQIIGMSATMPNVAAVADWLQAALYQTTFRPVPLEEFIKVGNQIFDKDMNIVRVLPKIADIGGKDPDHIVELCNEVVLEGHSVLLFCSSRKGCESTAKHIAKFLKVANVGSKEVSSEFRDVASAVEALKRCPAGLDPVLEETLPFGVAYHHAGLTVEERDIVETCYRKGLVRVLTATSTLAAGVNLPARRVIFRQPRIGRDFIDGTRYRQMAGRAGRTGIDTKGESILVCRPEEVKRITGIVRSDCPPLQSCLSEDKNGMTHAIMEVVAGGIVQTASDIHRYVRCTLLNSTKSFDDVVKSAQDSLRWLCHKRFVEWNNDTKIYSTTPLGRASFGSSLNPEESLVVLDDLSRAREGFVLASDLHLVYLVTPINVEVEPDWELYYERFMQLSSLEQSVGNRVGVTEPFLMHMAHGAAMPIRGRPKRNTSGGSGVNTLINDQSLRVSKRFYVALMISRLAQEIPVTDVCESFKVARGTIQALQENAGRFASMVSAFCQRLGWQDLEGLVAKFQNRVSFGVRAEIAELTTIPFVKGSRARALYNSGLRTPVTIAEASIPEIAKALFENSWSGQDDSGLRRMQFVIAKKIKNGARRIVLEEAEAARVAAFSAFKSLGVEVPQFTTPLLPASEDSPPREAMVFPSAGHAKCQESVLGARDGDERNICSDYVAQRASTEIVGEDMHPVSTIHIKESQGIANSVNLASMQEASPLSTLPSRNVADRGPVNAHNFPGGFDGFLDQWSSVNEFSFDLHFVKKSSKLSLTISEILGVAVCWESSPVYYCNFPKDLTPTGNNNSVELWEGFRRRWSRIVGIMQQKSVKKMTWNLKIQIQALKSPCVSCQRLSRLHLDPKTLNNIEVLDSTYVLLPPISVYNGLDICLVAWILWPDEESKTVPNLEKLVKRRLPSEAAAAANRDGRWRNQMHKAAHNGCCRRAAQTRALGSVLMKLLVSQNLSDLIETVEGPLVNVLADMELWGVGADMDACLRARHIIITRLKELDKEAYKLVGKSFSLNANADIADILFTHLKLPVPKGCEKGKLHPSTDKQCLDHLRDLHPIVSVIKEHRTLAKLLNGTLGSICSRAKLCIQSQRYIIHGNWLQTSTATGRLSMEEPNLQTVEHMVNFTTGKNDKDFTSMSMVDRHEINAREFFVPTQDNWLLVTADYSQIELRFMAHFSKDPVLIELLSKPDVDVFTMIASRWSGKEESLVSSKDRDNTKRFIYGILYGMGSNSLAEQLECSPAEAAQKIQSFKRFFPGVSSWLQQAVASCRQKGYVETLMGRRRFLTKITAGNSREKAQAQRQAVNSICQGSAADIIKVAMLKVHSVITNGSNTVDSMDGLTQNFSQIRGRCHLLLQVHDELVLEVDPSMVAEAVRLLQISMETAASLLVPLRAKVKVGKTWGSLEPFHPEP

SEQ ID NO: 11 - DNA, 6192 bp, Triticum aestivum
atggcgtcgggctcctcccgaggccacgtcgaccagttcttcgcggccaagaagcggcggccctcgtcgcagcatgggagccccggggccgccaagggctccctggcggggtacctggtccggtcccctcccgccgccgcggcgtcggcggcggcgtcgtcagcggccctcgccggctccccctcgggcgcccggaggagcctcgcggcgtccatgaacgccgacatcgccaattccgccgctgcgatgaatgtcgatgcgggcgattccgcggcggtggcgccggactacggggacgacctggagatgaagcggttcaccatggagttcctgtcccattactgcagcgatatcccgtctgttatgatgcctgatgctggcaagcgcgaaccggagaagcagcagaagaggagcgcggtcaactccttcctggctccctgcggcgacagatctgccaagaagcagtgcgtttctcgttgtgatgccgtcgaagttccaagggttaaggaatcaggggataacatgcccttgaaatgggtcggtaatcacggtgcttcacaacctcttgaggggttacatgagggggcgaagctaagcggtgagggatttgcggccttgcaaaggtccagctttaccccatatgctgcgcagaaaatggctgggttttctgcagcacctggggagaccccaaaatctgcatcctccctgatatcgccaggggaggacttctggaatgccgcaatggaatttgctgatgacgtctctgctatggctgataagggtcctcgaaggcgacactgtgatgcggcagaggacaagtcgtcctgtgcagttgcactgggttctaaggctcttcctagatcagggaatgaggaatttaactgtgaaaatacagtaggcagcaatcccatgaagcagatggacacgttatcaaatacagcagaattagcagtggcaagtagacagcataaaaacaactctcctttgcctgtgaagcatttggacttctttcatgaggatgcaattcaagtttcagacctggaaggtaaagaaaaaggtgacactgttcctggaagtgcacaagtgaaccagggtcgaccgatggacagtaactttcatagaacagaaaacctcatgcattctgtagatgacattaagacaattactttgtcagagtcaaaaactgcagggatgggtcattcaattgatgtgggcagcagaggttcttgtatgattaagagtgacctcaatcaactgacccatggtgagactaaactgctagctgcacattcgaatcctgacaagcctaacagagattccaagagtaagtttgcttctcaaagagtggaaacttgcactcctaccagctctgttcctctaaaggatcactccaagctctcaagctggctccctcatgagctttgtgctatatacatgaaaaaaggcattccacagctatatccatggcaggtggagtgtttacttgtggatggtctcttggagaatcgcaatcttgtatattgcgcatctacgagtgctggtaaaagttttgttgctgaagtgctgatgttgagacggatattgtccagtcaaaagatagcaattctagtccttccatatgtttcattatgtgctgaaaaggctgaacatctcgagcaacttcttgcgccactgggtaagcatgtccgtagctactatgggaatcaggggggagggtcgcttcctaaagatacatcagttgctgtatgtaccatagagaaggcgaattctttggtaaacaagttgttggaggatggccgcctttctgaacttggtataattgtaatagatgagcttcatatggttggtgatcagcacagagggtaccttttggagctgatgctcacaaaacttcggtatgctgctggtgaaggaaattcagggtcatctagtggagaaacttcaggttctagcagtgggaaggcgggtgctacccatggattacagattattggtatgagtgctactatgcccaacgttgcagctgtagctgactggcttcaagccgcactttatcaaactgcctttcgacccgtcccattggaggagtttatcaaagttggtaatcaaatatttgataaagacatgaatattgtacgcgtacttccaaaaatagctgatattggtggtaaggatccagatcatattgttgagttgtgcaatgaggttgttctggagggtcattctgttcttttgttttgctccagccgaaaaggctgtgaatcaactgcaaagcatattgcaaagtacttgaaagtagctaatgttggttcaaaagaaggctcagagttccgagatgctgcttctgcagttgaagccttgaagaggtgtcctgctgggttagatcctgtattggaagaaacccttccatttggtgttgcataccaccatgctggtctcacggttgaggagagagacattgtggaaacatgctaccgtaaaggccttgtccgagttttgactgccacatcaactttagctgctggagtaaacttgcctgccagacgagttatattcaggcaacctaggataggtcgtgatttcattgatgggactcgctatagacagatggctggccgtgctggtcgaactggaatagacacaaaaggagagagtatacttgtatgtaggcctgaagaggtaaagaggataacaggtattgttagaagtgattgtccccccttgcagtcatgcctctcagaagacaaaaatggaatgactcatgcaattatggaagttgttgctggtgggatcgtgcaaactgcaagtgatattcatcgatatgtgagatgtacgctgcttaactccaccaaatcttttgacgatgtcgtaaagtctgctcaagactctcttcgttggttatgccataaaaggtttgttgagtggaacaatgacaccaagatatactccaccactccacttgggcgagcatcttttggcagttctctcaatcctgaggaatcactggttgtgcttgatgatctttcaagggcaagagaaggttttgttctggcatctgatttgcatttagtctacttggtaacccccataaatgtagaagttgaacctgactgggagttatactacgagaggttcatgcaactgtcttctcttgagcagtcagttggcaaccgggttggagtaacagaacctttcttgatgcacatggctcatggggcagcaatgcctattcgtggaaggcccaagaaaaacactagtggaggttctggtgcaaacactcttattaatgaccagtcgcttagagtatctaagcgcttttatgtggcgctgatgatatcaaggctggctcaggagattcctgtcacagatgtttgtgaatcatttaaagttgctagaggtacgattcaagccttgcaggaaaatgctggcaggtttgcttcaatggtttctgccttttgtcagagacttggttggcaggatttagaaggtcttgttgccaagttccaaaaccgtgtctcgtttggagttagggcagagatcgcagaacttacaacaattccattcgtcaagggctcacgtgcaagggctctttataactctggtttgcgtacccctgttacaattgctgaagcatctattcctgaaattgcaaaagctcttttcgagaattcttggtctggtcaagatgattctgggttacggcgaatgcaatttggtatagccaagaaaataaaaaatggagctcgcagaattgttcttgaggaggcagaagcagccagagtagcagcattctcagctttcaaatcacttggggtagaagttcctcagtttaccacacctctgctcccagctagtgaggactctccacctcgagatgtcatggtatttcctggtgcaggtcatgctaagtgccatgagtcagttttaggggcacatgttggcgatgaaagaaacatctgctctgattatgttcctcaaagggcttctacagagattgtaggggaggatatgcaccctgtttctaccattcatattaaagagagccaaggaatagcgaatagtgtcaacattgctagtatgcaagaagcatcacctttatcaacgttgcccagcagaaatgtggctgacaaaggtcctgtcaatgcacataacttccctggagggttcgatggtttccttgatcagtggtcttctgttgatgaattttcttttgatcttcattttgttaagagatcaagtaaactatctttgaccatttttgaaattcttgggttagctgtttgctgggaaaattcacccgtctactactgcaatttcccgaaagacctaaccccaactggtagcaatgattctgttgaactgtgggaaggatttaggaaaagatggagtagaatagttggcattatgcagcaaaagagtgtcaagaaaacgacatggaatttgaagaatcagattcaggcacttaaatctccctgtgtttcttgtcaacggcttgctaggcttcacctcgaccctaaaacattgaacaatattgaagtcctagacagcacatatgtgttactaccaccaatctctgtctataatgggttggacatatgcttggtggcatggattctctggccagacgaggaaagcaaaacagtgccaaacctcgagaagttagtgaagagacggctaccaagtgaggctgcagcagcagcaaatcgggatggcagatggaggaatcagatgcacaaagcagctcacaatggttgctgtaggcgtgctgtgcagacaagagcgctgggttctgttttgctgaagttgcttgtttctcaaaatctcagtgatttgattgaaacagttgagggtccattggtaaatgtgcttgctgatatggaattatggggaattggtgctgacatggatgcatgtctccgtgcgaggcatattataataacaaggctgaaggagctagacaaagaagcatacaaattagcgggcaagagtttctcactaaatgcaaatgctgacatcgctgacattctttttactcacttaaaactgccagtcccaaaagggtgtgagaaagggaagttgcatcctagcactgacaagcagtgtctagaccatctaagggatctacacccaatcgtctcagtaattaaggaacatagaacattggccaaactgttgaatggcacattggggtccatttgttcacgggctaagttgtgcatccaatcccaaaggtacatcatacatggaaattggcttcagacatcaactgctactggccgtctatcaatggaagagccaaatctccagagtgttgagcacatggtggatttcacaacaagaaagaacgataaagatttcacaagcatgtcaatggttgatcatcatgaaatcaatgcccgtgaattttttgttcccactcaagaaaactggttgttggtaactgccgattactcccagatagagctgcgttttatggcgcatttttctaaagatcctgtattgatcgagcttctaagtaaaccagatgttgatgtgtttactatgattgcctcaagatggagtggcaaagaagagtctttggtctcttctaaggaccgagataacacaaagagatttatttatggcatcctttatggaatgggcgccaactcccttgcagaacaacttgaatgcagcccagcggaagctgcacagaaaattcagagtttcaagagattctttccaggcgtttcttcgtggctacaacaagctgtggcatcatgtcgccaaaaaggatacattgagaccttgatgggacggagacgttttctttcaaaaattaccgctggaaacagcagagagaaagctcaagcacagagacaagcagttaattctatttgccagggttctgctgctgatattatcaaggtggctatgcttaaggttcattctgtaattaccaatgggagtaacacagttgattccatggatgggcttatgcaaaacttttcacaaatcagagggcggtgtcaccttcttttgcaggtgcatgatgaacttgtgcttgaagttgacccgtctatggtagcagacgctgtaaatctgctacagataagcatggaaactgcagcttcactcttggtacctttacgtgctaaagtaaaggttggaaaaacttggggttctcttcagcctttccggccagagccttga

SEQ ID NO: 12 - protein, 2063 aa, Triticum aestivum
MASGSSRGHVDQFFAAKKRRPSSQHGSPGAAKGSLAGYLVRSPPAAAASAAASSAALAGSPSGARRSLAASMNADIANSAAAMNVDAGDSAAVAPDYGDDLEMKRFTMEFLSHYCSDIPSVMMPDAGKREPEKQQKRSAVNSFLAPCGDRSAKKQCVSRCDAVEVPRVKESGDNMPLKWVGNHGASQPLEGLHEGAKLSGEGFAALQRSSFTPYAAQKMAGFSAAPGETPKSASSLISPGEDFWNAAMEFADDVSAMADKGPRRRHCDAAEDKSSCAVALGSKALPRSGNEEFNCENTVGSNPMKQMDTLSNTAELAVASRQHKNNSPLPVKHLDFFHEDAIQVSDLEGKEKGDTVPGSAQVNQGRPMDSNFHRTENLMHSVDDIKTITLSESKTAGMGHSIDVGSRGSCMIKSDLNQLTHGETKLLAAHSNPDKPNRDSKSKFASQRVETCTPTSSVPLKDHSKLSSWLPHELCAIYMKKGIPQLYPWQVECLLVDGLLENRNLVYCASTSAGKSFVAEVLMLRRILSSQKIAILVLPYVSLCAEKAEHLEQLLAPLGKHVRSYYGNQGGGSLPKDTSVAVCTIEKANSLVNKLLEDGRLSELGIIVIDELHMVGDQHRGYLLELMLTKLRYAAGEGNSGSSSGETSGSSSGKAGATHGLQIIGMSATMPNVAAVADWLQAALYQTAFRPVPLEEFIKVGNQIFDKDMNIVRVLPKIADIGGKDPDHIVELCNEVVLEGHSVLLFCSSRKGCESTAKHIAKYLKVANVGSKEGSEFRDAASAVEALKRCPAGLDPVLEETLPFGVAYHHAGLTVEERDIVETCYRKGLVRVLTATSTLAAGVNLPARRVIFRQPRIGRDFIDGTRYRQMAGRAGRTGIDTKGESILVCRPEEVKRITGIVRSDCPPLQSCLSEDKNGMTHAIMEVVAGGIVQTASDIHRYVRCTLLNSTKSFDDVVKSAQDSLRWLCHKRFVEWNNDTKIYSTTPLGRASFGSSLNPEESLVVLDDLSRAREGFVLASDLHLVYLVTPINVEVEPDWELYYERFMQLSSLEQSVGNRVGVTEPFLMHMAHGAAMPIRGRPKKNTSGGSGANTLINDQSLRVSKRFYVALMISRLAQEIPVTDVCESFKVARGTIQALQENAGRFASMVSAFCQRLGWQDLEGLVAKFQNRVSFGVRAEIAELTTIPFVKGSRARALYNSGLRTPVTIAEASIPEIAKALFENSWSGQDDSGLRRMQFGIAKKIKNGARRIVLEEAEAARVAAFSAFKSLGVEVPQFTTPLLPASEDSPPRDVMVFPGAGHAKCHESVLGAHVGDERNICSDYVPQRASTEIVGEDMHPVSTIHIKESQGIANSVNIASMQEASPLSTLPSRNVADKGPVNAHNFPGGFDGFLDQWSSVDEFSFDLHFVKRSSKLSLTIFEILGLAVCWENSPVYYCNFPKDLTPTGSNDSVELWEGFRKRWSRIVGIMQQKSVKKTTWNLKNQIQALKSPCVSCQRLARLHLDPKTLNNIEVLDSTYVLLPPISVYNGLDICLVAWILWPDEESKTVPNLEKLVKRRLPSEAAAAANRDGRWRNQMHKAAHNGCCRRAVQTRALGSVLLKLLVSQNLSDLIETVEGPLVNVLADMELWGIGADMDACLRARHIIITRLKELDKEAYKLAGKSFSLNANADIADILFTHLKLPVPKGCEKGKLHPSTDKQCLDHLRDLHPIVSVIKEHRTLAKLLNGTLGSICSRAKLCIQSQRYIIHGNWLQTSTATGRLSMEEPNLQSVEHMVDFTTRKNDKDFTSMSMVDHHEINAREFFVPTQENWLLVTADYSQIELRFMAHFSKDPVLIELLSKPDVDVFTMIASRWSGKEESLVSSKDRDNTKRFIYGILYGMGANSLAEQLECSPAEAAQKIQSFKRFFPGVSSWLQQAVASCRQKGYIETLMGRRRFLSKITAGNSREKAQAQRQAVNSICQGSAADIIKVAMLKVHSVITNGSNTVDSMDGLMQNFSQIRGRCHLLLQVHDELVLEVDPSMVADAVNLLQISMETAASLLVPLRAKVKVGKTWGSLQPFRPEP

SEQ ID NO: 13 - DNA, 6003 bp, Secale cereale
atgaacgccgacatcgccaattctgccgcggcgatgaatgtcgatgcgggcgattccgtggcgccggcgccggactacggggacgacctggagatgaagcggttcaccatggagttcctgtcccattactgcagcgatatcccgtctgttatgatgtctgatgctggcaagggcgaaccagacaagaatcagaagaggagcgcggtcaactccttcttggctccctgtggcgacagatctgccaagaagcagtgcgttgctcgttgtgatgccgtcgaattcgcaagggtcaaggaattaggggacaacgtacccttgaaatgcgtcggtaatcacggtgcttcagaacctcttgaggggttacacgagggggcaaagctaagcggtgagggatttgcggccttgcaaaggtccagctttaccccatatgctgcgcagaaaatggctgggttttctgcagcacctggggagaccccaaaatctgcatcctccctgatatcaccaggggaggacttctggaatgccgcaatggaatttgctgatgacgtctctgctatggctgataagggtcctcgaaggcgacactgtgatgcggcagaggacaagtcgtcctgtgcagttgcactgggttctaagacttttcctagatcaggaaatgaggaatttaactgtgaaaatacagtaggcagcaatcctatgaagcagatagacacgttctcaaatacagcagaattagcagcggcaaatagacagcataaaaacaactctcctttgcctgtgaagcatttggacttctttcatgaggatgcaattcaagtttcaggtttggaaggtaaagaaaaatgcgacactgttcctggaagtgcacaagtgaaccagggtccaccgatggacagtagctttcatagaacagaaaacctcatgcattctgtagatgacattaagacaattactttgtcagagtcaaaaactgcatggatgggtcattcaattgatgtgggcggcagaggttcttgtatgattaagagtgacctcaatcaactgatccatggtgagactaaaccgctagttgcacattcaaatcctggcaagcctaacagagattccaagagtaagtttgcttctcaaagagtggaaacttacactcctaccagctctgttcctctaaaggatcactccaagctctcaagctggctccctcatgagctttgtgctatatacatgaaaaaaggcattccacagctatatccatggcaggtggagtgtttacttgtggatggtgtcttggagaatcgcaaccttgtatattgcgcatctacgagtgctggtaaaagttttgttgctgaagtgctgatgttgagacggatattgtccagtcaaaagatagcaattctagtccttccctatgtttcattatgtgctgaaaaggctgaacatctcgagcaacttcttgcgccactgggtaagcatgtccgtagctactatgggaatcaggggggagggtcgcttcctaaagatacatcagttgctgtatgtaccatagagaaggcgaattctttggtaaacaagttgttggaggatggccgcctttctgaacttggtataattgtaatagatgagcttcatatggttggtgatcagcacagagggtaccttttggagctgatgctcacaaaacttaggtatgccgctggtgaaggaaattcagagtcatccagtggagaaacttcaggttctagcagtgggaaggcgggtgccacccatggattacagattattggtatgagtgctactatgcccaatgttgcagctgtagctgactggcttcaagccgcactttatcaaactgcctttcgacccgtcccactggaggagtttatcaaagttggtaatcaaatatttgataaagacatgaatattgtacgcgtacttccaaaaatagctgatattggtggtaaggatccagatcatattgttgagttgtgcaatgaggttgttctggagggtcattctgttcttttgttttgctccagccgaaaaggctgtgaatcaactgcaaagcatattgcaaagtacttgaaagtagctaatgtcggttcaaaagaaggctcagagttccgagatgctgcttctgcagttgaagccttgaagaggtgtcctgctgggttagatcctgtattggaagaaacacttccatttggtgttgcataccaccatgctggtctcacggttgaggagagagacattgtggaaacatgctaccgtaaaggccttgtccgagttttgactgccacatcaactttagctgctggagtaaacttgcctgccagacgagttatattcaggcaacctaggataggtcgtgatttcattgatgggactcgctatagacagatggctggtcgcgctggtcgaactggaatagacacaaaaggagagagtatacttgtatgtaggcctgaagaggtaaagaggataacaggtattgttagaagtgattgcccccccttgcagtcatgcctctcagaagacaaaaatggaatgactcatgcaattatggaagttgttgctggtgggatcgtgcaaactgcaagtgatattcatcgatatgtgagatgtacgctgcttaactccaccaaatcttttgacgatgtcgtaaagtctgctcaagactcccttcgttggttatgccataaaaggtttgttgagtggaacaatgacaccaaaatatactccaccactccacttgggcgagcatcttttggcagttctcttaatcctgaggaatcactggttgtgcttgatgatctttcaagggcaagagaaggttttgttctggcatctgatttgcatttagtctacctggtaacccctataaatgtagaagttgaacctgactgggaattatactacgagaggttcatgcaactgtcttctcttgagcagtcagttggcaaccgggttggagtaacagaacctttcttgatgcacatggctcatggggcagcaatgcctattcgtggaaggcccaagaaaaacactagtggaggttcgggtgcaaacactcttattaatgaccagtcgcttagagtatctaagcgcttttatgtagcgctgatgatatcaaggctggctcaggaaattcctgtcacagatgtttgtgaatcatttaaagttgccagaggtacgattcaagccttgcaggaaaatgctggcagatttgcctcaatggtttctgccttttgtcagagacttggctggcaggatttagaaggtcttgttgccaaattccaaaaccgtgtctcgtttggagttagggcagagatcgcagaacttacaacaattccattcgttaagggctcacgtgcaagggctctttataactctggtttgcgtacccctgttaccattgctgaagcatctattcctgaaatcgcaaaagctcttttcgaaaattcttggtctggtcaagatgattctgggttacggcgaatgcaatttggtatagccaagaaaataaaaaatggagctcgcagaattgttcttgaggaggcagaagcagccagagtagcagcattctcagctttcaaatcacttggggtagaagttcctcagtttaccacacctctgctcccagatagtgaggactctccacctcgagatgtcatggtatttcctggtgcaggtcatgctaagtgccaagagtcagttttaggggcacgtgttggtgatgaaagaaacatctgctctgattatgttgctcaaagggcttctacaaagattgtagaggaggatatgcaccctgtttcttccattcatattaaggagagccaaggaatagcaaatagtgtcaacattgctagtatgcaagaagcatcacctttatcgacgacgcccagcagaaatgtggctgacaaaggtcctgtcaatgcacataacttccctggagggttcgatggtttccttgatcaatggtcttctgttaatgaattttcttttgatcttcattttgttaagagatcaagtaaactatctttgactatttttgaaattcttgggttagctgtttgttgggaaaattcaccggtctactactgcaatttcccaaaagacctaaccccaactggtagcaatgattctgttgaactgtgggaaggatttaggagaagatggagtagaatagttggcattatgcagcaaaagagtgtcaagaaaacgacatggaatttgaagattcagattcaggcacttaaatctccctgtgtttcttgtcaacggcttgctaggcttcacctcgaccctaaaacattgaacaatattgaagtcctagacagcacatatgtgttattaccaccaatctctgtctataatgggttggacatatgcttggtggcatggattctctggccagacgaggaaagcaaaacagtgcctaacctcgagaagttagtgaagagacggctacctagtgaggctggagcagcagcaaatcgggatggcagatggaggaatcaaatgcacaaagcagctcacaatggttgctgtaggcgtgctgcgcagacaagagcactgggttctgttttgatgaagttgcttgtttctcaaaatctcagtgatttgattgaaacagttgagggtccattggtaaatgtacttgctgatatggaattatggggaattggtgctgacatggatgcatgtctccgtgcgagacatattataataacaaggctgaaggagctagacaaagaagcatacaaattagcgggcaagagtttctcattaaatgcaaatgctgacatcgctgacattctttttactcacttaaaactgccagtcccaaaaggttgcgagaaagggaagttgcatcctaccactgacaagcagtgtctagatcatctaagggcatcagcagagcaatctcaagaatttgaagatgcttatgctaaaacaagccactctgagcacaaacgcctggatctacacccaatcgtctcagtaattaaggaacatagaacattggccaaactgttgaatggcacattggggtccatctgttcacgtgctaagttgtgcatccaatcccaaaggtatgttatacatgggaattggcttcagacatcaactgctactggccgtctatcaatggaagagccaaatctccagagtgttgagcacgtggtggatttcacaacaggaaagaatgataaagatttcacaagcatgtcaatggttgatcatcatgaaatcaatgcccgtgaattttttgttcccactcaagagaactggttgttggtaactgccgattactcccagatagagctgcgttttatggcacatttttctaaagatcctgtattgattgagcttctaagtaaaccagatgttgatgtgtttactatgattgcctcaagatggagtggcaaagaagagtctttggtctcttctaaggaccgagataacacaaagagatttatttatggcatcctttacggaatgggcgcgaactcccttgcagaacaacttgaatgcagcccagcggaagctgcacagaaaattcagagtttcaagagattctttccaggtgtttcttcgtggctacaacaagctgtggcatcatgtcgccaaaaagggtatattgagaccttgatgggacggagacgttttctttcaaaaattaccgctggaaatagcagagagaaagctcaagcacagagacaagcagttaattctatttgccagggttctgctgctgatattatcaaggtggctatgcttaagattcattctgtaattaccaatgggagtaacacagttgattccatggatgggcttacgcaaaacttttcacaaatcagagggcggtgtcaccttcttttgcaggtgcatgatgaacttgtgcttgaagttgacccgtctatggtagcagaggctgtaaatctgctacagataagcatggaaactgcagcttcactcttgggtatcatttttacgctgaactga

SEQ ID NO: 14 - protein, 2000 aa, Secale cereale
MNADIANSAAAMNVDAGDSVAPAPDYGDDLEMKRFTMEFLSHYCSDIPSVMMSDAGKGEPDKNQKRSAVNSFLAPCGDRSAKKQCVARCDAVEFARVKELGDNVPLKCVGNHGASEPLEGLHEGAKLSGEGFAALQRSSFTPYAAQKMAGFSAAPGETPKSASSLISPGEDFWNAAMEFADDVSAMADKGPRRRHCDAAEDKSSCAVALGSKTFPRSGNEEFNCENTVGSNPMKQIDTFSNTAELAAANRQHKNNSPLPVKHLDFFHEDAIQVSGLEGKEKCDTVPGSAQVNQGPPMDSSFHRTENLMHSVDDIKTITLSESKTAWMGHSIDVGGRGSCMIKSDLNQLIHGETKPLVAHSNPGKPNRDSKSKFASQRVETYTPTSSVPLKDHSKLSSWLPHELCAIYMKKGIPQLYPWQVECLLVDGVLENRNLVYCASTSAGKSFVAEVLMLRRILSSQKIAILVLPYVSLCAEKAEHLEQLLAPLGKHVRSYYGNQGGGSLPKDTSVAVCTIEKANSLVNKLLEDGRLSELGIIVIDELHMVGDQHRGYLLELMLTKLRYAAGEGNSESSSGETSGSSSGKAGATHGLQIIGMSATMPNVAAVADWLQAALYQTAFRPVPLEEFIKVGNQIFDKDMNIVRVLPKIADIGGKDPDHIVELCNEVVLEGHSVLLFCSSRKGCESTAKHIAKYLKVANVGSKEGSEFRDAASAVEALKRCPAGLDPVLEETLPFGVAYHHAGLTVEERDIVETCYRKGLVRVLTATSTLAAGVNLPARRVIFRQPRIGRDFIDGTRYRQMAGRAGRTGIDTKGESILVCRPEEVKRITGIVRSDCPPLQSCLSEDKNGMTHAIMEVVAGGIVQTASDIHRYVRCTLLNSTKSFDDVVKSAQDSLRWLCHKRFVEWNNDTKIYSTTPLGRASFGSSLNPEESLVVLDDLSRAREGFVLASDLHLVYLVTPINVEVEPDWELYYERFMQLSSLEQSVGNRVGVTEPFLMHMAHGAAMPIRGRPKKNTSGGSGANTLINDQSLRVSKRFYVALMISRLAQEIPVTDVCESFKVARGTIQALQENAGRFASMVSAFCQRLGWQDLEGLVAKFQNRVSFGVRAEIAELTTIPFVKGSRARALYNSGLRTPVTIAEASIPEIAKALFENSWSGQDDSGLRRMQFGIAKKIKNGARRIVLEEAEAARVAAFSAFKSLGVEVPQFTTPLLPDSEDSPPRDVMVFPGAGHAKCQESVLGARVGDERNICSDYVAQRASTKIVEEDMHPVSSIHIKESQGIANSVNIASMQEASPLSTTPSRNVADKGPVNAHNFPGGFDGFLDQWSSVNEFSFDLHFVKRSSKLSLTIFEILGLAVCWENSPVYYCNFPKDLTPTGSNDSVELWEGFRRRWSRIVGIMQQKSVKKTTWNLKIQIQALKSPCVSCQRLARLHLDPKTLNNIEVLDSTYVLLPPISVYNGLDICLVAWILWPDEESKTVPNLEKLVKRRLPSEAGAAANRDGRWRNQMHKAAHNGCCRRAAQTRALGSVLMKLLVSQNLSDLIETVEGPLVNVLADMELWGIGADMDACLRARHIIITRLKELDKEAYKLAGKSFSLNANADIADILFTHLKLPVPKGCEKGKLHPTTDKQCLDHLRASAEQSQEFEDAYAKTSHSEHKRLDLHPIVSVIKEHRTLAKLLNGTLGSICSRAKLCIQSQRYVIHGNWLQTSTATGRLSMEEPNLQSVEHVVDFTTGKNDKDFTSMSMVDHHEINAREFFVPTQENWLLVTADYSQIELRFMAHFSKDPVLIELLSKPDVDVFTMIASRWSGKEESLVSSKDRDNTKRFIYGILYGMGANSLAEQLECSPAEAAQKIQSFKRFFPGVSSWLQQAVASCRQKGYIETLMGRRRFLSKITAGNSREKAQAQRQAVNSICQGSAADIIKVAMLKIHSVITNGSNTVDSMDGLTQNFSQIRGRCHLLLQVHDELVLEVDPSMVAEAVNLLQISMETAASLLGIIFTLN

SEQ ID NO: 15 - DNA, 6863 bp, Oryza sativa
cgtggctcgagccgaatattagtagggctttcttcatttccgcctccattgatttcaaacgaaaaccgccgactgcctcccctcccttcccctctccgtcgtgcccccttccggccttcccccaatggcgtcgggctcctctcgagccaacatcgaccagttcttcccggccaagaagaggaggccctcgtcgcgcaaggacgagccgccgtccgggagcccgaggggcgccaaggggtccctggaggggtaccttgtccgttccccttcaaccgcggcggcggcctcgttggactcgccgaggggtggtggggacgcggcgggcgccaggaggagcctctccgcggcgatggatgtcgatgtcggccatcccgccacggcggtggcgacagatgagggggattttgagctgaagaggtttgcgatggagttcttgtcattgtcccattactgcagtgttatcccttctgtcatgggtggtgctagcaatggcgaagcgggcaagcagcagaagaggagtgcgatccagtcgttcttggctccttgtagcaatgcatctgccaagaagcagcgcgttgctcactctggggacttggaagctctaaaggatgtaggtcataaaacccccttccgggaaaaatgtggcactcaatacggtggcccagaggctttggaggaattaggtgaggggacaaagctgagcagtgagggttttgtggctttgcaacgatgtagctttaccccaaatactggacagaaaagggttggattttcaacagcaccaggggctggggaaacaccgatgtctgtatccacgaactctctgatttcacccggggaggaattctggaatgcagcaattgaatttgctgatggcatttctgctcgggctgagaagggtcctggaaggcctgagtgtgatgtggatgacaagtcatcctgtgcagttgcattgtgctctaagattcttcccagatccggaaatggtggttctgaccatgaaaacacagtaggaagcaatgagacaaagcaaatggacagatcttcatataaagaagaaccagtggcagcaaataatcatcatgtaaacagctctccgttgcctgtgaagcatttggacttttttcatgaggatgaaattcaagttccaggcctgaaaattgaagaaaaaggtggtgctgtagatctgagtcaaaagagtcaaatgaagaacagagaaaatctcacgcattctgtagataacgtgaataaaagtacttttgacatgcacatagattcttcagctacgattcatgatgagtgtctgtccaagttaacaacagaagggaaaaatcatccaacaagagtgggtgacagtggttcttgtctgactagaagagacctcaatcaactgatctatagtgaggataagctgcttactgcgtattcagatcatggcaagcctagcaaagattgtacaaataaatttgcatcccaagaaatggaagccaacactcctactagttctgttccccaaaaggaccactcaaagctgtcaagttggcttccccctgagctctgtgctatatacatgaaaaagggtattccagagctgtatccttggcaggtggaatgtttacttgtggaaggtgtcttggagaaacgcaatcttgtttattgtgcatctacaagtgctggtaaaagttttgttgctgaaattctaatgttgagacggatattgttcagtggaaagatggcaatccttgtacttccctatgtgtcaatatgtgctgaaaaggctgaacatcttgagcaacttcttgagccgctaggcagacatgttcgaagcttctatggaaatcaggggggagggtcacttcctaaggatacatcagttgctgtatgtaccatagagaaggccaattctttggtaaacaagttgttggaggaaggccgtctttctgaacttggcataatagtaatagatgagcttcatatggttggtgaccaacaccgaggatatcttttggagctgatgctgacaaagcttaggtatgcagctggtgaagggaattcagaatcatcaagtggagaaatctcaggttctagcagtgggaagatggatgcaactcatggattgcagattattggtatgagtgctactatgcccaatgttgcagctgtagctgattggcttcaagctgcactttaccaaacagaatttcgacctgttccgctggaggaatttattaaagtcggtaatcaggtctttgataaagatatgaatgttgttcgcgtgcttccaaaagtagctgatcttggcggtaaggatccagaccatattgttgagttgtgcaatgaggttgttcagcaggggcattctgttcttttgttttgctccagccggaaaggctgtgaatcaactgcaagacatgttgccaagtttttgaaagtggcttctgttggatcaagtgacgttggctcagaatttccagatgctacatttgcagttgaagccttgaagaggagcccttctgggttagatcctgtattagaagagacccttccctctggagttgcataccatcatgctggtttaacggttgaggagagggagattgtggaaacatgttaccgtaaaggtcttgtcagagttttggctgccacttcaactttagctgctggtgttaacttgcctgccagacgagtaatatttaggcaacctaggataggtcgtgacttcattgatggaactcggtacaagcaaatgtctggtcgtgctggtagaactggcatagatacaaagggagagagtatacttgtatgcaagcctgaagaggtcaagaggattacaggtattcttagaagtaactgtactcccttggagtcttgcctctcagaagataaaaatggaatgactcatgcaatcatggaggttgttgctggtggaattgtgcaaactgcaagtgatatccatcgatatgtgaggtgtacgctgcttaactctactaaaccttttgaggatgttgtgaagtcagctcaggactcccttcgttggttatgccataaaaggtttcttgagtggaataatgaaactaaaatatactctactactccacttgggctagcagcttttggcagttcacttaatcctgaggaatcgttggtcgtgctggatgatctttcaagggcaagagaaggctttgttctggcatgtgatttgcatttggtttacctggtaaccccgataaatgtagatgtcgaacctgattgggaattgtactatgagaggttcatgcaacttacttctcttgagcagtcagttggcaaccgggttggagtaatagaaccatttttgatgcacatggctcatggggctgcaatgcctgttcgtggaaaacctcagcgtgctggtatccgcaacaggtcaccaacacgaggttctggtggaaatgcacttattaatgagcaggcacttcgagtttctaagcgcttttatgtggccttgatgttgtcaaggcttgctcaggaaattcctgtcacagatgtttgtgaggcattcaaagttgcaagaggtatgattcaagctttacaggaaaatgctggcaggtttgcttcaatggtttctgtgttttgtcagagacttggttggcatgatttagaaggccttgttgctaagttccaaaaccgagtctgttttggagtcagagcagagattgcggaacttacatcaattccatttgtcaagggttcacgtgcaagggctctttataagtctggtttgcgtactcctgttgccattgctgaagcatctattcctgaaattgcaaaagctctttttgaatcttctacttggtctggccaaggtgattctggtttacgccgaatgcaattgggtattgccaagaagataaaaaatggagctcgaaaaattgttcttgaggaggcagaagcagctagagtagcagcattctcagctttcaagtcacttggtgtacaagttcctcagtttactacacctctactcccaactatcgatgaacccccaactcgagatagcatggtttctgttggcagaggtcaagctagtgatgatacaaataactgcttcagttatggttctcaaagggcttctacagagagaactttagggaacgatatgcaccctggttcttccatacaaataacagagagtgcaagaatagtgaataatgccaacatcgttgtccaagtagcatcacctttctccatagaaactaaattaagcagcagaaatgtggctgacaaaggccctgttaatgcatataatttcccaggagggtttgacagttttcttgatcaatggtctactgttagtgagttttcttttgatcttcattatgtcaagaagtcaattaaatcatcttcaacctatttcgatattcttggtttggctgtctgttgggaaaattcacctgtttactactgcaactttccgaaagacctaatgatggctggtagcaatgactccattgaaatgtgggacgaactaacgagaagatggaacagagtaatcgaaattatgcgacaaaacagtgtcaaaaaaatgacctggaatttaaagttccagattcaagcattgaagtatccctgtgtttcttgtcaacggctctctagacttcatcttgactacaaaatgttgaagaatgttgaagtcctcgacaacttgtatgttttcctacaaccagtttctgtccacagtggattggacatatgcttggtggcatgggttctctggcctgatgaggaaagtaaaacagtgccaaatcttgagaagttagtgaagagacgactacacaatgaagctgcagcagctgcaaatcgagatggcagatggagaaatcagatgcacaaagcagctcataatggttgctgtcggcgtgctgcacagacacgggcattgtgttctgttttgaggaaattacttgtttctcaaaatctcaatgatttactcgaaacaattgagggcccattggtaaatgttcttgctgatatggaactttggggaattggtgctgacatggatgcatgtctccgtgcgaggcatatcataataagaaagctgaaagaactagagaaagaagcttataaattagctggcaagagcttctcactaaatgcaactgctgacatcgctgacgttctttatacacacttaaaactgccagttccaaaaggttgtgggaaaggaaaattgcatcctagcactgacaagcagtccttggaccatctaagggatcaacatccaattatatctgtaattaaggaacatagaacattggcaaaactgttaaatggcaccttggggtccatttgctcacgggctcagttgtgcagcaaatcacaaagatacatcatacaaggaaattggctccagacatcaactgccactggccgtctatcaatggaagaaccaaatctgcagtgtgttgagcacttggtggatttcacaacattgaagaatgatcatgattccacaagcatgtcaatggttgatcatcatgaaatcaatcctcgtgattttttcattcccacccaagagaattggttgctggtaacagctgattactcacagatcgagctgcgtttaatggctcatttttctaaagatactgcattgattgaacttctaagtaaaccagatggtgatgtatttactatgattgcttcaagatggactggtaaagcggagtccttgatctgttcaaaggaaagagagaccaccaaaagatttatttatggcatcctctatggaatgggtgccaactctctagcagaacaacttgaatgcagcccagaagatgctgcacagaaaatccaaagttttaagaggttctttcctggtgtctcttcatggctacacgaagctgtggcatcatgtcgtcataaagggtatgtggagaccttaatgggaaggagacgttttctttcaaaaataacagccggaaatagcaaggagaaagcaaaggcacagagacaagcagttaattctatttgccagggttctgcagctgatattatcaaagtggctatgattaaagttcattctgcaattacaaatgggagcacggtgggagcaacagttgattcaattgatgtggctatgcagaacttttctgaaatcagaggccgttgtcaccttattctgcaggtgcatgatgaactggtgcttgaagttgatccatgtatggtagcggaggctgtaaggttactacagactgtcatggagaactctgcttcactcttagtgcctttacgcactaaaataaaggtaggacaaacttggggttctttagaaccgttccatctagaaccttgacgcgatggtgaatgcttctttggagcaaggtcccaagaaatcatctgtttgttaatggaaaggctaaggtgccattgcagtcagaaaggctgggtcagggccttcggtctcctttcttttattacgtgccaccttgaatctatataaaacaggttacattgcttcagttacggagtccattgttgagaatgaggattgaaggacaggccaacggttccgactgaagctgcagtaccgcctatacaggattcatcacattattcatagagcagacaaggggaacatctcaaggggacatccacttctacagtatatatatattttttttgcgaggacttctacagtatatatgttgtactgtaaatggacagactgtaatagcttgttcattcttttttgcctgatgtcttgattatgtatatattgattatagaggtgttgctcgagttgaagacttgtgaaactgtcatgttgcacagtacttatcatttatgagagtaacatcgttcgttgctctttttgtgca

SEQ ID NO: 16 - protein, 2070 aa, Oryza sativa
MASGSSRANIDQFFPAKKRRPSSRKDEPPSGSPRGAKGSLEGYLVRSPSTAAAASLDSPRGGGDAAGARRSLSAAMDVDVGHPATAVATDEGDFELKRFAMEFLSLSHYCSVIPSVMGGASNGEAGKQQKRSAIQSFLAPCSNASAKKQRVAHSGDLEALKDVGHKTPFREKCGTQYGGPEALEELGEGTKLSSEGFVALQRCSFTPNTGQKRVGFSTAPGAGETPMSVSTNSLISPGEEFWNAAIEFADGISARAEKGPGRPECDVDDKSSCAVALCSKILPRSGNGGSDHENTVGSNETKQMDRSSYKEEPVAANNHHVNSSPLPVKHLDFFHEDEIQVPGLKIEEKGGAVDLSQKSQMKNRENLTHSVDNVNKSTFDMHIDSSATIHDECLSKLTTEGKNHPTRVGDSGSCLTRRDLNQLIYSEDKLLTAYSDHGKPSKDCTNKFASQEMEANTPTSSVPQKDHSKLSSWLPPELCAIYMKKGIPELYPWQVECLLVEGVLEKRNLVYCASTSAGKSFVAEILMLRRILFSGKMAILVLPYVSICAEKAEHLEQLLEPLGRHVRSFYGNQGGGSLPKDTSVAVCTIEKANSLVNKLLEEGRLSELGIIVIDELHMVGDQHRGYLLELMLTKLRYAAGEGNSESSSGEISGSSSGKMDATHGLQIIGMSATMPNVAAVADWLQAALYQTEFRPVPLEEFIKVGNQVFDKDMNVVRVLPKVADLGGKDPDHIVELCNEVVQQGHSVLLFCSSRKGCESTARHVAKFLKVASVGSSDVGSEFPDATFAVEALKRSPSGLDPVLEETLPSGVAYHHAGLTVEEREIVETCYRKGLVRVLAATSTLAAGVNLPARRVIFRQPRIGRDFIDGTRYKQMSGRAGRTGIDTKGESILVCKPEEVKRITGILRSNCTPLESCLSEDKNGMTHAIMEVVAGGIVQTASDIHRYVRCTLLNSTKPFEDVVKSAQDSLRWLCHKRFLEWNNETKIYSTTPLGLAAFGSSLNPEESLVVLDDLSRAREGFVLACDLHLVYLVTPINVDVEPDWELYYERFMQLTSLEQSVGNRVGVIEPFLMHMAHGAAMPVRGKPQRAGIRNRSPTRGSGGNALINEQALRVSKRFYVALMLSRLAQEIPVTDVCEAFKVARGMIQALQENAGRFASMVSVFCQRLGWHDLEGLVAKFQNRVCFGVRAEIAELTSIPFVKGSRARALYKSGLRTPVAIAEASIPEIAKALFESSTWSGQGDSGLRRMQLGIAKKIKNGARKIVLEEAEAARVAAFSAFKSLGVQVPQFTTPLLPTIDEPPTRDSMVSVGRGQASDDTNNCFSYGSQRASTERTLGNDMHPGSSIQITESARIVNNANIVVQVASPFSIETKLSSRNVADKGPVNAYNFPGGFDSFLDQWSTVSEFSFDLHYVKKSIKSSSTYFDILGLAVCWENSPVYYCNFPKDLMMAGSNDSIEMWDELTRRWNRVIEIMRQNSVKKMTWNLKFQIQALKYPCVSCQRLSRLHLDYKMLKNVEVLDNLYVFLQPVSVHSGLDICLVAWVLWPDEESKTVPNLEKLVKRRLHNEAAAAANRDGRWRNQMHKAAHNGCCRRAAQTRALCSVLRKLLVSQNLNDLLETIEGPLVNVLADMELWGIGADMDACLRARHIIIRKLKELEKEAYKLAGKSFSLNATADIADVLYTHLKLPVPKGCGKGKLHPSTDKQSLDHLRDQHPIISVIKEHRTLAKLLNGTLGSICSRAQLCSKSQRYIIQGNWLQTSTATGRLSMEEPNLQCVEHLVDFTTLKNDHDSTSMSMVDHHEINPRDFFIPTQENWLLVTADYSQIELRLMAHFSKDTALIELLSKPDGDVFTMIASRWTGKAESLICSKERETTKRFIYGILYGMGANSLAEQLECSPEDAAQKIQSFKRFFPGVSSWLHEAVASCRHKGYVETLMGRRRFLSKITAGNSKEKAKAQRQAVNSICQGSAADIIKVAMIKVHSAITNGSTVGATVDSIDVAMQNFSEIRGRCHLILQVHDELVLEVDPCMVAEAVRLLQTVMENSASLLVPLRTKIKVGQTWGSLEPFHLEP

SEQ ID NO: 17 - DNA, 7270 bp, Glycine max
ccggtagtaggtataacattgccgggaagccaaacaccgcccgttcccccgaaaatttcaatttcaatttgcagctttcagtcagggcgccactccaaagagcacaaaccgctcggttcgtcgtgtctcttcaactcggctctcgcgaagcatcaaagcaacgcattatgcgacgttgtatgatgcatcatcattctcatgcctagcgcaaggcgaagaagaagaacaacaacgaaacacaacgcttctcgttcttcacatggcttctccttcgcatcgctctcgcatcgatcagttttacgcttcgaagaagaggaaagcagcgtcgcctgttcctaaagccgggagattcgaaaaaggtgcgaggcatggggctgatgagtctccgagtgccaaaggcactttggagggttacttggtttcgtcacaggacggtggtggtgacggctgcggtgacgcaaacactgttaaggttaagagaaacttgacatcggagattggtggttctcttgacaatgagcttaataagcatactgtttcattgggtcaagggtgtggagattctcaatctattcagccgagtgaaattggacagggtgtggcgaaatcggagaggaaacagtttgctgctgactttttgtctttgtattgcagtgtattgcatccgagtgtgggtttgccgttggagatgaaaatggatgatcacaagagacatggttcaccaacattagtagagggaaatagtgttttactgcggaagaataatgacactgctggtgagctatgtttcggtggtgaaaatacattgttgagtgtgaagatcgatgaagacatcaagtctggtgttgttggtaataataattctatgggatgtgttcctggctcttgtacgaaggtttctggtggtggtgatactactggctttgagacaggctttaggaaatgtaataatacacctaaaccatcaatgaaattggctgaatactacaacacaccggggtctttgattgttaaagcaagtgttagggagactccaaagtcaacacgcggcagctcatcattttcgcctggagaggcattttggaatgaggcaattcaacttgctgatggtttgtgtgttcccatgggtaatgatccttctaaggttatgggagaaagtaatgtggtggaagaggaacctgagatgaagaactcatgcaatttacaaaattatgatggcaaaccaaggaaaatattggatcaaagtaaaaacagaatccggaatagggaaatgggtgctcctttagggttagttgggatgcacactaaagattctgtgaaagaagcatccagccttcctgttaaacattttgatttttcgtttgaggacaacaatttggaagaaaataccttgcaagactgtcgtgttggtgattcaatcaatgttacttgtgtggctggtaaacagtatgattcatgttctatgataggtcatacatatgaaaagatgaatgaagtgcaagagaatactttagtagatacattaggcaaaagggtttgtcaggataatgttagcatgacatctaattcaccccacaatgaggtcaggacaccgattagtgcacatgcatctgatgaagccagtactccttcaactagtgtatcacttaatgatcattttgacctaaacagctggcttcctcctgaaatatgcagcatatatagaaagaaaggaatctcaagactttacagttggcaggttgattgccttcgagtggatggtgtcctacagagaagaaatcttgtatattgtgcttctacaagtgctggtaagagttttgttgctgagattttaatgctgcggagggtgataataactggaaaaatggcactacttgttcttccgtatgtatcaatttgtgcagaaaaggctgaacacctcgaacgtctccttgatccacttggtaaacatgttcgtagttattatggaaaccaaggtggtggaacacttcctaaagatacttctgtagctgtctgcactatagagaaggcaaactcactagttaatagattattggaagaggggcgtctatcagaaatgggaattatcgtaattgatgaactgcatatggttggtgatccaagaagaggttatctacttgaacttatgttgacaaagcttcgttatgcagcaggggaaggtattccaaaatcaagtgatggagaaagttccggtggaagcagtgataaggctgatcctgcccaaggtctgcaaattgtcggaatgagtgcaacaatgccaaatgttgcagcagttgctgactggcttcaagcagcactataccagaccgagttccggccagttcctctagaagaatatataaaagttggtaattccatttacaacaaaagtatggaactttgtagaataatctcaaaagcggctgaacttggtggtaaagatccagatcatgttgttgaactatgtaatgaggttgttcaagagggacactcagttttaatattttgctctagccggaagggttgtgagtcaactgcaaggcacattgcaaagttccttaaaagctttactgttgatgctaatgattgtgagtttgccgatattacttctgctattaactccttgggaaagtgccctgctgggttggaccccatattacaggaaactcttccttctggtgttgcatttcaccatgctggccttacggttgaggaacgagagattgttgaaacctgttatcggaagggccttttacgtgtcttaactgccacgtcaaccttagcagctggggtaaatctgccagctaggagggtaattttccgccaacctagaattggttgtgattttctagatgggacgaggtacaaacagatggctggtcgtgctggtcgaactggaattgatacaaaaggagaaagtatacttatctgtaaaccagaagaactaaaaaaggtttcgggactgcttaatgaaagctgtcctccattacattcctgtttgtccgaagacatgaatggaatgactcatgcaatcttagaagtagtggctggaggaattgttcaaactgctagcgatattaaccggtatgttagatgtacccttttaaattctacaaaaccatttctagacgtggtgaaatctgcacaagaatcccttcgatggttgtgccaaagaaaatttcttgaatggaatgaagacactaaactctacagtaccacacctcttggacgtgcatcttttggcagttctctttgtccacaagagtcacttattgtgttagctgatctttcaagggcaagggaaggatttgtccttgcatctgacttgcatttagtttacttggtgacaccaatcaatgtagatgttgagccagattgggaattgtactatgagcattttgtgaaattgtctctgcttgaccagtcagttggcaatcgagtaggtgtgacagaaccattcttgatgtatatggcacatggtgcaccactacgtgcttcaaacaagtcaagagataatacaagatcattgcacaatcaacgaagaaatcaacttgggatttccagtgcaacagctaactatgatgatcaaacacttcgtgtctgtagaagattctatgttgctctcattttgtcacttctagttcaggaaattcctgtgggtgaggtttgtgaagcattcaaagttgccaggggaatggttcaagccttgcaagagaatgctggtaggtttgcatctatggttgctgtgttttgtgagcgacttgggtggcatgatcttgaaggcttagttgctaagtttcaaaaccgtgtatcatttggagttagagcagagattgtagaacttaccactattccctatgttaaaggttctcgagccagatcactctataaagctggtttacgtacaccccatgcaattgctgaggcatccattcctgagatagtaaaagcactttttgaatcttcatcatgggccacagaaggttctgcacaaaggggatttcaatttggtatagcaaaaaagataaagaatggtgcccgcaagattgtttttgataaagctgaggaggcaagtaacgctgctttctcagcctttaaatcacttgggttcaatgtcccacagtttgatcctcaaatattatctactgctgctcgtgattctatcaggctaggaactggaagtacctctggaagtgacacaactgatactagtcatagttttgttaatgcagattgcattgataatactaataaatttactttagataaagaaaaagaagacttaataaaattatctgttaacggtactgtggcttctgtagaaggaaaatcaagaagcaggatgatatgtagcttgtccagtgttccagttgcaggacctaaaatggatgaactcaataggacttctgaccataccaaaaatgcagacatgaccattctctctgttcaattgcagaaaccaaatgataaatctggtgtacatgatgggtgcgatgctcattgtacagaggaagcgcataagaatggaaatttggctagtggtaatgctggtagttccagccagaaaggtcccattaatgcagttagtagtcctggtgggcttgattcatttttggatctatgggactctatgccagagttctattttgatatccattatatcaaacgattggaattgcactctactgctccctttgaaatacatggcatagctgtttgttgggaaaactcttctgtgtactacattaatcttcccagagatattctgttgtctgacagtataaaagatggctgtttatccttgagtgcatgcagtcataagaagaaagtttcatcttctaattctaagcaagatctagagattgctagatctagatggaacagaattagtaaaataatagggaaaataaatgtcagaaagttcacctggaatttgaagattcagatgcaggtgctgaaaaggccagcattttcagttcagagatttggttgcttggacacacttggaaaaagtatggaccttgaagttgtagacaattcttatgtgttattgccccctatacatgttaaagatgcaattgatatgtgcattgtggcttggattctttggcccgatgaagagagtagctctagtccaaacctggataaggaggtaaagaagaggttatcctctgaggatgctgcagtcgccaatcagagtggcaggtggaggaatcagatgcgaagggctgctcataatggttgctgccgtcgggttgctcaaatacgagcattaagttctgttctttggaaattacttgtttctgagaaacttgttgaagtgcttatggatatagaaatcccattggtgaatgttgttgctgacatggagctttggggaattggtgttgatttggagagatgcatccaggctcgtaaattgttgattaaaaggctaaagcatcttgagaaggaagcttataaactggctggaacgacattttcattaaatatgccagcagatattgcaagagtgctgtatgaacacttgaagctgcccatacctgatgtgcggaataagggaaagcaacatccgagtactagcaagcactgcttggatgcactgaggcatgaacatcccattgttccagtcattaaagaacatcgaacaatggcaaagctgttgaactctacgttaggatcaatttgttccctggctaggctatctgtaagcacacagaagtatacattacatggtcattggctccagacgtccacggcaactggtcggctttcaatggaggaacctaatcttcagtgtgttgagcatgcagtagaattcaaaatgaaagatgaaaatgaaggtgatgctgacgagagttattgtacaattaatgctcgtgatttctttgttcctactcaggacaactggttactgttaacagcagattattctcagatagaattgagattgatggctcacttctctaaagactcttcacttgttgaacttctcagtaagcctgatggtgatgtctttacaatgatagcagcaagatggactgggtgtcctgaggtttctgtgtgttctaaggagagagagcagaccaaaaggatggtgtatggcattctttatggtatgggggtcaatagccttgcagaacaactggattgcacttctgatgaagctgctgaaaagattgctaacttcaaaagctcttttcctggtgtttcttcctggcttcttgaagccgttgcgtcttgtcgcagtaaaggatatgttgagactcttaagggaagaaaaaggtttttgtcaaaaataaaatatggcagcagtacagaaaaatcaaaagctcagaggcaagctgtaaattccatttgtcagggatctgcggcagacataattaagattgcaatgttaagaatttactctgcaattgtcactggatttgatagtccagattccagttcttcactagcaaccaagtttcacatgcttaaagatcgttgccggattctgttacaggtacacgatgaattaatgttggaagttgatccttctgtgataaaagaagcagccctactattgcagacaagcatggagaatgcggtctcacttcttgttcctttgcatgtcaaacttaaggttggaagaacatggggatctttggagccatatacatccgataaattcaacaatgccactcttgtggctgaatcctgaagcacagaggttatttttatgacccaaggataaagtatttgatgatgttgaggatgcattctccataattgattcggaggtttggtgtggtggggaattatccgaatgcccaagggaagaattatgacgaagaggcttacggtgtatagtatctggagtcctcgctgagtaatagacaaaagggtaatgttttgtgtacacccatatgctgaaaaagaaatagaagatagcgaagtgatagatgtcacaagtaatgtgacacgagaagaaaacgatccaggcagtgtgtcaaatgagtgtttgtaatattgacgtgtccatgtcattcaaaataaaatgagtttcagtgcctagccactgatagcactgctatttttcattaaatccttttttatgataggaatacaaatttttttagggatctgtatatactcaagtatctggctgtagggttgagttggaaagaaaaatgaacatgatcttctctccccattgtatcattcaaagctaatgtaaagcgaattcattttacatttgtttagtgatttattgaattcccaaatctca

SEQ ID NO: 18 - protein, 2147 aa, Glycine max
MASPSHRSRIDQFYASKKRKAASPVPKAGRFEKGARHGADESPSAKGTLEGYLVSSQDGGGDGCGDANTVKVKRNLTSEIGGSLDNELNKHTVSLGQGCGDSQSIQPSEIGQGVAKSERKQFAADFLSLYCSVLHPSVGLPLEMKMDDHKRHGSPTLVEGNSVLLRKNNDTAGELCFGGENTLLSVKIDEDIKSGVVGNNNSMGCVPGSCTKVSGGGDTTGFETGFRKCNNTPKPSMKLAEYYNTPGSLIVKASVRETPKSTRGSSSFSPGEAFWNEAIQLADGLCVPMGNDPSKVMGESNVVEEEPEMKNSCNLQNYDGKPRKILDQSKNRIRNREMGAPLGLVGMHTKDSVKEASSLPVKHFDFSFEDNNLEENTLQDCRVGDSINVTCVAGKQYDSCSMIGHTYEKMNEVQENTLVDTLGKRVCQDNVSMTSNSPHNEVRTPISAHASDEASTPSTSVSLNDHFDLNSWLPPEICSIYRKKGISRLYSWQVDCLRVDGVLQRRNLVYCASTSAGKSFVAEILMLRRVIITGKMALLVLPYVSICAEKAEHLERLLDPLGKHVRSYYGNQGGGTLPKDTSVAVCTIEKANSLVNRLLEEGRLSEMGIIVIDELHMVGDPRRGYLLELMLTKLRYAAGEGIPKSSDGESSGGSSDKADPAQGLQIVGMSATMPNVAAVADWLQAALYQTEFRPVPLEEYIKVGNSIYNKSMELCRIISKAAELGGKDPDHVVELCNEVVQEGHSVLIFCSSRKGCESTARHIAKFLKSFTVDANDCEFADITSAINSLGKCPAGLDPILQETLPSGVAFHHAGLTVEEREIVETCYRKGLLRVLTATSTLAAGVNLPARRVIFRQPRIGCDFLDGTRYKQMAGRAGRTGIDTKGESILICKPEELKKVSGLLNESCPPLHSCLSEDMNGMTHAILEVVAGGIVQTASDINRYVRCTLLNSTKPFLDVVKSAQESLRWLCQRKFLEWNEDTKLYSTTPLGRASFGSSLCPQESLIVLADLSRAREGFVLASDLHLVYLVTPINVDVEPDWELYYEHFVKLSLLDQSVGNRVGVTEPFLMYMAHGAPLRASNKSRDNTRSLHNQRRNQLGISSATANYDDQTLRVCRRFYVALILSLLVQEIPVGEVCEAFKVARGMVQALQENAGRFASMVAVFCERLGWHDLEGLVAKFQNRVSFGVRAEIVELTTIPYVKGSRARSLYKAGLRTPHAIAEASIPEIVKALFESSSWATEGSAQRGFQFGIAKKIKNGARKIVFDKAEEASNAAFSAFKSLGFNVPQFDPQILSTAARDSIRLGTGSTSGSDTTDTSHSFVNADCIDNTNKFTLDKEKEDLIKLSVNGTVASVEGKSRSRMICSLSSVPVAGPKMDELNRTSDHTKNADMTILSVQLQKPNDKSGVHDGCDAHCTEEAHKNGNLASGNAGSSSQKGPINAVSSPGGLDSFLDLWDSMPEFYFDIHYIKRLELHSTAPFEIHGIAVCWENSSVYYINLPRDILLSDSIKDGCLSLSACSHKKKVSSSNSKQDLEIARSRWNRISKIIGKINVRKFTWNLKIQMQVLKRPAFSVQRFGCLDTLGKSMDLEVVDNSYVLLPPIHVKDAIDMCIVAWILWPDEESSSSPNLDKEVKKRLSSEDAAVANQSGRWRNQMRRAAHNGCCRRVAQIRALSSVLWKLLVSEKLVEVLMDIEIPLVNVVADMELWGIGVDLERCIQARKLLIKRLKHLEKEAYKLAGTTFSLNMPADIARVLYEHLKLPIPDVRNKGKQHPSTSKHCLDALRHEHPIVPVIKEHRTMAKLLNSTLGSICSLARLSVSTQKYTLHGHWLQTSTATGRLSMEEPNLQCVEHAVEFKMKDENEGDADESYCTINARDFFVPTQDNWLLLTADYSQIELRLMAHFSKDSSLVELLSKPDGDVFTMIAARWTGCPEVSVCSKEREQTKRMVYGILYGMGVNSLAEQLDCTSDEAAEKIANFKSSFPGVSSWLLEAVASCRSKGYVETLKGRKRFLSKIKYGSSTEKSKAQRQAVNSICQGSAADIIKIAMLRIYSAIVTGFDSPDSSSSLATKFHMLKDRCRILLQVHDELMLEVDPSVIKEAALLLQTSMENAVSLLVPLHVKLKVGRTWGSLEPYTSDKFNNATLVAES

SEQ ID NO: 19 - DNA, 8410 bp, Solanum tuberosum
tttctcctcccccatagctctcttctgcgcggtcttaatagattcaaatggcttcttcaacatttgcagcgtagccagaagaacaaaaattccaatttcaaatccacgaatgcgaacacaattttctgaaccaaatcatcaaatcttctactgggtttcttcttctcatggcttctgatactcctcgagcacgcattgatcaattctttgcttcgaaaaagaagaggaagtccttatcaccgagtttgaaacctacaagagccaagaaagatgttaagactacacaggaagggtctccttccatgaaaggttcgttgaatgggtatttagtgacttctcaggatgatagtaaaccttcacacatagctagaggcacaccggtcaagagaaacctgacgttagagatcggtccatatctaaaagatgaaaataaagagcgtacttttctggtcgaagcacaatctacaactactgaagcaaaaacttcaaaggagaagtctgatattccctctgactcacatgttgttgaaaatagaggtcatggaaaagatgtcttggttactacacaggttaatggaaactcagaacttaagcagtttgctacgaactttttgtcattatattgcagtgaactgccatctagtttaagtttaccttcagcacagcgtgagggtggtagtaaaaggagtggtagccctcccttacttgaggtggataataagaacgcaaagagaatccgctgcatctcgagtgaaaatgattctaacatcaacagaagatctaattctgagtgcgcagctttaaattctattgagataacagaggggaatacatcaggtgaagctcggataagcttgagaaagtgtaacaatgtacctgtcattgggtcaactgaatctgagacacctggttcaacatctacaaagcttcgtattggagttactcccaagtcaactcgtggtagctccattttttcacccggagaagcattttggaatgaagcaattcaagttgctgatggtttgtttgagggaagtgataaattttcttctcaagcagcacttgagtccaacgctttgaaaaatcataatgaggtaatcaattccaatagtcttggaaacggagagtgtggcaataagtctcaccaagtatttaatgaaggtatagagacagtttctgatgccggcattgtttctgctgttggttcattgaggaagttgggaaaggatctggatggagagaaatccccaatgcctgttaagcattttgattttgcctctgacgaaaaaaatttcgattctgtacaatctcacagaagtaacttggatatcctgactattagtggcaaaagaactgggtcccaagatcatctaagtttgagtggatatcctgttcttagccctcacaaggcagctcaagcaaaagggaatatccttgaagttcaaaacaagactccagaatgtcctgtttctaagggtaaggatgtgcttatccagggtactgatataatggcatcaacaacacctccggagaaacttaatagttatacagctaatttcttatcaagtaaagacaacacaccttcaagtattgcaccactaaagaatcattcagatctcaaccattggctaccttctgaagtatgcaacatttacaggaaaaaggggatttcaaaattgtactcatggcaggttgattgtcttcaagtggatggagtcttgcacaaccggaatcttgtatattgtgcttctaccagtgctggtaaaagttttgttgctgagatattaatgttacggagaatcttatcatctggaaaaatgggtcttcttgtactcccatatgtatccatttgtgcagagaaggcagaacatcttgaggcccttctggaaccagttggaaagcatgttcgcagttattacggtaatcagggaggtggtagtctcccaaaggataccgctatagctgtttgcactattgagaaagcaaattccttaattaatcgactgctagaagagggccgtttgtcagagcttggtatcatagtgattgatgaactccacatggttggagaccagaataggggttatctattggagttgatgttgaccaaacttcgctatgcatctggtgaaggaaatacagagtcatccagtggagaaacttcaggcacgagcagtggaaaagttgaccctgctggaagtctccaaattgttggcatgagtgcaactctccccaatgtgacagcagtcgcagattggcttcaagcagctttgtatcagaccgagtttcgacctgttccattggaagaatatgtaaaagtaggaaacacaatttataaccaaaaaatggacattgtcagaacaatctcgaaagcagctgatcttggtggtaaagatccagatcacattgtggagctctgcaatgaggttgtccaagaaggcaactcagtgctaattttctgctcaagtcgcaaaggatgtgaatctactgctaggcatgtggcgaaacatgttaaaagattttccttgaatcaactgagcggccaaaatgagtcaattgatattacttctgcaattgatgctttacgaagatctccagctgggttggatcctattctggaagagactcttcctgccggtgttgcctatcaccatgctggactcacggttgaggaaagagaaacagttgaaacctgttaccgcaaaggacttgtacgtgtcttaacagctacatcaaccttagctgcaggggttaaccttcctgctcggagagttatttttcgacaaccacgtattggtcgtgactttattgatggtacaaggtaccgacagatggctggtcgggctggtcggacgggtatagatacaaaaggagagagtgtgttgatctgcaaacccgaagaggtcaaacgaataacggcacttgttaacgagagctgtccaccgttgcattcttgtttatccgaagataagaatgggatgatccacgcaatattggaagttgttgctggtggtattgttcaaacagctagtgatattaaccggtacgttaggtgtacccttctcaattcaacaaaaccatttgatgatgtggttaaatcagcacaagattctcttcgctggttatgccataaaaaatttcttggatggagtgaagataccaaattatacacagtcacgcctcttggttgtgcagcttttggcagttctctctcccctgaagaatcactggttgtcttggatgatttgattagagcgagggaagggtttgtgcttgcatctgatctgcatgttgtttacttagtgacacccattaatgttgatcttgagccagattgggaactgtattaccagaggttcatggagttgtctaccctggatcagtcagttggcaatcgggttggagttcaagaaccctttttgatgcgaatggctcatggtgcaccagttcgtgcatcttataggtcaaaggctggtactaaagggttgcagggaaagttggataacagatctctgaatgaccatatgctgtcagatgagaagatgcttcgcatctgtcggagattctttgtggctcttatactgtcaaggctcgtgcaggaagtgccggttatcgaggtttgtggtgcatttaaagttgcaaggggcatggttcaggccttacaagaaaatgctggaaggtttgcttccatggtttctgttttttgtgagaggcttggttggcatgaccttgaaggcttagtatcaaagttccaaaatcgtgtctcatttggtgtgcgggcagagattgtagagctcaccaccattccatatgttaagggttcccgagctcgagcactatataaagcgggtcttcggacacctgaagcaattgctgaagcatctgttcctgagatgatcaaagtactttttgagtcttcatcatgggctgaccaaggttctgcacaacggaggatccaattaggagttgcgaaaaagataaaaaatggtgcacgcaagattgttctcgataaagctgaggaagcaaggcttgctgcattctcagctttcaagtcgcttggacttgatgtgtcaacgcttgcacagcctgtcatatctactgctgctggagatggtgctcacaaagaagctagtacctcctctgcagaagggtcgactagtagctttattagcctggagaatgcaaatcgaatctcttccacatccatagaaaaaagtaaggaggtcaatatcactattcctgatgctggagcagaaaatgcaaaaagcaaaacaattgctgacaaagaggcatttgatatagaaggacctaatggtcttaacgctgaagttaatgaatctactcatcatattgataatgcaaagacttccccttatcctactttaaaaattaaggggatcgaaggaggtggtacatgtactgatcataatcatactgggaaacaacactgtgaaggagctgagatatgtaatgtaagagtcaaagaaacatcagagaagggccctatgaatgcgactgctgttgttggtggatttgatactttcctgggtctctgggaagctgctgaggagttttactttgatgtccatttcagcaaaaagtctgcactgaacagcattgccccatttgaaatatatggcatagcaatttgttgggaagattctcctgtctattatgtaaatcttccgagggacttattttggtccaacagcaaaaggaatagccaatcgtcgcccattaccagtggtgatattgggaatgttctaccaccaaatcttcagtgggagatagcgatacaccgatggaataaaattagtaccataatgagaaaaaaagatataaaaaagtttacatggaacttaaaagttcagattcaggtactcaagcatcctactgtttcaattcagagatctggtggtttgagtcttttggtcaaatctctcggagtggatcttattgacaacaattgctatctgttgtctcctgttcccattcaagatgcaattgacttgtgtatagtagcttgggtcctctggcctgatgaggagaaaggttctaaccctagtatagaaaaggaagtgaagaaaaggttatccatcgaggctgctgctgccgctaatcgaaatggtagatggaagaatcagatgcgacaagttgctcataatggttgttgtcgtcgagtagcacaaacacgagccttgcgttctgttctatggaaattagtcatttctgaaggacttgttgaagcacttggagcaactgaaatgccattggtcaatgttcttgcagacatggagctctgcggaataggtgttgacatggaaggatgcctacaggcacgacaaattctgggaagaaagctgaagattctggaaaaggaagcttacaagttggctggcatgactttttcattgtacacagcagcagaaattgcgaatgtactctatgggcatctacagcttcctgttccagaaggacgtaaaaaaggaaagaagcaccctagtactgataagcattgcttggatttgctaaggaatgaacatccaatagtacctataattaaagagcaccgtactctagcaaaactcttgaattgtacattggggtcgatctgttcacttgctagactatctatgaggacacagagatacacactgcatggtcattggctccagacgacaacagcaacagggcgactgtcaatggaggaacctaatcttcagtgtgttgaacatatggttgacttcaaaatgaataacaaggataaagacgtttgtccgttagatgtcaataattataagatcaatgctcgtgatttttttgtgtctactcaggacaattggttactgttaacagcagattattcccagatagaactgagattgatggcccatttctctaaagattcctcgttgatcgaactgcttagtgaaccccaaggtgatgtcttcaacatgattgctgcaaaatggacaggtaaaacagaggctattgtgagtcgagaggagcgagatcaaactaaaaggttggtttacggcattctttatggaatgggggctaagagccttgcagaacaaatcgattgtagtgcagatgaagctgctgaaagaatcgaaagctttaaaagatcttttccaggtgttgcttcctggctacaggaagcagttacatcttgccgtgagaaaggttatatagaaaccctcaagggacgaaagcgtttcttggcaaaaattaacttcggaaacagtaaggaaaagtctaaagctcagaggcaagctgtgaattctatctgccaggggtctgctgcagacattatcaagattgcaatgataaacattcactctgtgcttgatcattttgagaaatcactgtcccattttgcggttgatgaaaagtttcatgtgcttaaaggacgttgtcggattattttacaggttcatgatgaattagtacttgaggctgatccttctgttgcaaaggaagctggattgttgttgcagatgagcatggaaagtgctgtttctcttcttgtcccactgcatgtgaaactgaagattgggagcacatggggatcgttggaacctttccaggccagagaatgataggtttttaagtgtggacatttgttggcaaagtttaaaactattagttgcttcatgctgtttgaacagtatcaacagctgttattttcagtttcctctcaagcaagacctttatctaacagaccaagcaaatgatgttcacatgggatgcagctgtataacttcatgtgaattagctggtcatcaaagttataatgtgttctttgttggcagtcataatctcacaatttctgtacaagcaaaggatctgattgatggattaggttacttgaaggaagtgggaaggacagaggaagagactctttactttattgaacaaatctgcacttgttggtgctctgataaatttgtagaactgtgacattcaagtaagtaatattgtgatgagggtgctcagaaccaaggccgctttcaatatttttgagagcctgagatgttaagactatgctgatgagattttcctgattgtctccagagcatgatgcttcatcgtgttgtaagctgacaagcatttacagggagaatgtgcttaattaatgatgattatataagggttctacctcattctcctggatctcagagaaagcggatgcttaatattgaagtgtcaattaatggcagggtaatacctatcaagagaaccaaggagttggtccaagtggtggaagccttctaggtgcttaatcctttatgatcaaatttcaaatcctactggagccatattcattattcaagcttgtgttggccctgggctacgaaccttgtgaggtgattaatgctctgtagttgtgccttgaatgatttcaatggggttattggtcccctaaaacccaaaagacaagggaaaaagaaatttacaggaaagcaataagcataggataattacttttccattggctaacccctcaaaatttagttaatgcgaatctccaggaacatttcgggtttctatgaaatgtcgtgcgaggatattgaatgtcttctggtgcattttctgctatatgttccctgacatctaatgcatgtggaattggttaatggtgtttgagaatgttacttgctgtttttttgtctctcttatggaggaacaacctgggacctggaagatccacatccaatcacgtcgtacagtgagaagagatagatcaacctcaaggggttggggtctgaaggcatgccacagttgcaggagctttcctggcagtcaaatttgaaaatatagagctcacccagaatggttgttatcattgctcagaagacctcattggaagttactgttactgtgctatgcgagaactagagaaaggttgtcatttggttaatgatcgatcctgcagaggagacatgaaaattgtattggaaaggtgcatggataaaaattctggcactttgaatctgcttgtggtgtttgtatcggaaaggtgcatggataaaatttctggcacattgaatctgcttggtgctcgagggagacaatcaaaggagttttgatggtaaggcgaatctagattattgaagtctattatatagcagtggtacttcatgcgggtgttcgattgcttgtattgtaacccgaactgagacaactgaccacttattcttttctatttcaaattacaccaattcactctacatagtcccttgattctgtgttgaggaatattgcaagaaagactcttaaatctatttgaaaacaagatgtcataatctccattaccacatatattcatcaaccatatttgaaatacaagccaaacattttcatccacacatgcaaacaacgtgcatgatgaactgtgattaacaca

SEQ ID NO: 20 - protein, 2144 aa, Solanum tuberosum
MASDTPRARIDQFFASKKKRKSLSPSLKPTRAKKDVKTTQEGSPSMKGSLNGYLVTSQDDSKPSHIARGTPVKRNLTLEIGPYLKDENKERTFLVEAQSTTTEAKTSKEKSDIPSDSHVVENRGHGKDVLVTTQVNGNSELKQFATNFLSLYCSELPSSLSLPSAQREGGSKRSGSPPLLEVDNKNAKRIRCISSENDSNINRRSNSECAALNSIEITEGNTSGEARISLRKCNNVPVIGSTESETPGSTSTKLRIGVTPKSTRGSSIFSPGEAFWNEAIQVADGLFEGSDKFSSQAALESNALKNHNEVINSNSLGNGECGNKSHQVFNEGIETVSDAGIVSAVGSLRKLGKDLDGEKSPMPVKHFDFASDEKNFDSVQSHRSNLDILTISGKRTGSQDHLSLSGYPVLSPHKAAQAKGNILEVQNKTPECPVSKGKDVLIQGTDIMASTTPPEKLNSYTANFLSSKDNTPSSIAPLKNHSDLNHWLPSEVCNIYRKKGISKLYSWQVDCLQVDGVLHNRNLVYCASTSAGKSFVAEILMLRRILSSGKMGLLVLPYVSICAEKAEHLEALLEPVGKHVRSYYGNQGGGSLPKDTAIAVCTIEKANSLINRLLEEGRLSELGIIVIDELHMVGDQNRGYLLELMLTKLRYASGEGNTESSSGETSGTSSGKVDPAGSLQIVGMSATLPNVTAVADWLQAALYQTEFRPVPLEEYVKVGNTIYNQKMDIVRTISKAADLGGKDPDHIVELCNEVVQEGNSVLIFCSSRKGCESTARHVAKHVKRFSLNQLSGQNESIDITSAIDALRRSPAGLDPILEETLPAGVAYHHAGLTVEERETVETCYRKGLVRVLTATSTLAAGVNLPARRVIFRQPRIGRDFIDGTRYRQMAGRAGRTGIDTKGESVLICKPEEVKRITALVNESCPPLHSCLSEDKNGMIHAILEVVAGGIVQTASDINRYVRCTLLNSTKPFDDVVKSAQDSLRWLCHKKFLGWSEDTKLYTVTPLGCAAFGSSLSPEESLVVLDDLIRAREGFVLASDLHVVYLVTPINVDLEPDWELYYQRFMELSTLDQSVGNRVGVQEPFLMRMAHGAPVRASYRSKAGTKGLQGKLDNRSLNDHMLSDEKMLRICRRFFVALILSRLVQEVPVIEVCGAFKVARGMVQALQENAGRFASMVSVFCERLGWHDLEGLVSKFQNRVSFGVRAEIVELTTIPYVKGSRARALYKAGLRTPEAIAEASVPEMIKVLFESSSWADQGSAQRRIQLGVAKKIKNGARKIVLDKAEEARLAAFSAFKSLGLDVSTLAQPVISTAAGDGAHKEASTSSAEGSTSSFISLENANRISSTSIEKSKEVNITIPDAGAENAKSKTIADKEAFDIEGPNGLNAEVNESTHHIDNAKTSPYPTLKIKGIEGGGTCTDHNHTGKQHCEGAEICNVRVKETSEKGPMNATAVVGGFDTFLGLWEAAEEFYFDVHFSKKSALNSIAPFEIYGIAICWEDSPVYYVNLPRDLFWSNSKRNSQSSPITSGDIGNVLPPNLQWEIAIHRWNKISTIMRKKDIKKFTWNLKVQIQVLKHPTVSIQRSGGLSLLVKSLGVDLIDNNCYLLSPVPIQDAIDLCIVAWVLWPDEEKGSNPSIEKEVKKRLSIEAAAAANRNGRWKNQMRQVAHNGCCRRVAQTRALRSVLWKLVISEGLVEALGATEMPLVNVLADMELCGIGVDMEGCLQARQILGRKLKILEKEAYKLAGMTFSLYTAAEIANVLYGHLQLPVPEGRKKGKKHPSTDKHCLDLLRNEHPIVPIIKEHRTLAKLLNCTLGSICSLARLSMRTQRYTLHGHWLQTTTATGRLSMEEPNLQCVEHMVDFKMNNKDKDVCPLDVNNYKINARDFFVSTQDNWLLLTADYSQIELRLMAHFSKDSSLIELLSEPQGDVFNMIAAKWTGKTEAIVSREERDQTKRLVYGILYGMGAKSLAEQIDCSADEAAERIESFKRSFPGVASWLQEAVTSCREKGYIETLKGRKRFLAKINFGNSKEKSKAQRQAVNSICQGSAADIIKIAMINIHSVLDHFEKSLSHFAVDEKFHVLKGRCRIILQVHDELVLEADPSVAKEAGLLLQMSMESAVSLLVPLHVKLKIGSTWGSLEPFQARE

SEQ ID NO: 21 - DNA, 8204 bp, Solanum lyopersicum
ctttactgcgcggtctttaatagattcaaatggcttcttcaaactttgcagcgtagccagaagaacaaaaattccaatttcaaatctatgaatgcgaacacaatttgctgaaccaaatcatcaaatcttctattgggtttcttcttctcatggcttctgatactcctcgagaacgcattgaccaattctttgcttcgaaaaagaagaggaagtccttatcaccgagtttgaaacctacaagagccaagaaagatgttaagactatacaggaagtgtctccttccacgaaaggttcgttgaatgggtatttagggacttctcaggatgatagtaaatcttcacacatagctagaggcgcaccggttaagagaaacctgacgttagagatcggtccatatctaaaagatgaaaataaagggagtacttttctggtcgaagcacaatctacaactactgaagcaaaaacttcaaaggaggaatttgatattcactccgactcacatgttgttgaaaatagaggtcatggaaaagatgtcttggttactacaaaggttaacggaaactcagaacttaagcagtttgctacgaattttttgtcattatattgcagtgaactgccatctagtttaagtttaccttcagcacagcgtgagggtggtagtaaaaggagtggtagctctcccttacttgaggtggataataagaatgcaaagagagtccgctgcatctcaagtgaaaatgattctaacctcaacagaagatctaattctgagtgtgcagctttaaattctattgagataacagaggggaatacatcaggtgaagctcggataatcttgagaaaatgtaacaatatacctgtcattgggtcaactgaatctgagacacctggttcaacatcttcaaagcttcgtattggtgttactcccaagtcaactcgtggtagctccattttttcacccggagaagcattttggaatgaagcaattcaagttgctgatggtttgtttgagggaagtgataaattttcttctcaaacagcacttgagtccgacgctttgaaaaatcataatgaggtaatcaattctaatagtcttgggaatggagagtgtggtaataagtcccaccaagtatttaatgaaggtatagtgacagtttctgatgccggcattgtttctgctgttgcttcattgaggaagttgggaaaggatctggatggagagaaatccccaatgcctgttaagcattttgactttgcctctgacgaaaaaaatttcgattctatacaatctcacagaagtaacttggatatcctgactattagcggcaaaataaccgggtcccaagatcatctaagtttgagtggatatcctgttgttagccttcacaaggcagctcaagaaaaagggaatatccttgaacttcaaaacaagactccaaaatgtcctgtttctaagggtaaggatgtgcttatccaggatactgatataatggcatcaacaacacctccggagaaacttaatagttatacagataattccttatcaagtaaagacaacactccttcaagtattgcaccactaaagaatcattcagatctcaaccattggctaccttctgaagtatgcaacatttacaggaaaaagggcatttcaaaattgtactcatggcaggttgattgtcttcaagtggatggagtcttgcacaaccggaatctggtatattgtgcttctactagtgctggtaaaagttttgttgctgagatattaatgttacggagaatcttatcatctggaaaaatgggtcttcttgtacttccttatgtatccatttgtgcagagaaggcagaacatcttgaggtccttctggaaccagttggaaagcatgttcgcagttattatggtaatcagggaggtggtagtctcccaaaggataccgctatagctgtttgcactattgagaaagcaaattccttaattaaccgactgttagaagaggaccgtttgtcagagcttggtatcatagtaattgatgaactccacatggttggagaccagaataggggatatctattggagttgatgttgaccaagcttcgctatgcatctggtgaaggaaatacagagtcatccagtggagaaacttcaggcacgagcagtggaaaagttgaccctgctggcagtctccaaattgttggcatgagtgcaactctgcctaatgtgacagcagtcgcagattggcttcaagcagctttgtatcagaccgagtttcggcctgttccattggaagaatatgtaaaagtaggtaacacaatttataaccaaaaaatggacattgtcagaacaatctcgaaagcagctgatcttggtggtaaagatccagatcacatcgtggagctctgcaatgaggtcgtccaagaaggcaactcagtgctaattttctgctcaagtcgcaaaggatgtgaatctactgctaggcatgtggcgaaacatcttaaaaaattttccttgaatcaactgagtggccaaaatgagtcaattgatattacttctgcaattgatgctttacgaagatctccagctgggttggatcctattctggaagagactcttcctgccggtgttgcctatcaccatgctgggctcacggttgaggaaagagaaacagttgaaacctgttaccgcaaaggacttgtacgtgtcttaacagctacatcaaccttagctgcaggggttaaccttcctgctcggagagttatttttcgacaaccacgtattggtcgtgactttattgatggtacgaggtatcgacagatggctggtcgggctggtcggacgggtatagatacaaaaggagagagtgtgttgatctgcaaaccagaagaggtcaaacgaataacggcacttgttaacgagagctgtccaccgttgcattcttgtttatccgaagataagaatgggatgatccacgcaatattggaagttgttgctggtggtattgttcaaacagctagtgatattaaccggtatgttaggtgtacccttctcaattcgacaaaaccatttgatgatgtggttaaatcagcacaagattctcttcgctggttatgccataaaaaatttcttggatggagtgaagataccaaattatacacagtcacgcctcttggtcgtgcagcttttggcagttctctctctcctgaagaatcactggttgtcttggatgatttgattagagcgagggaagggtttgtgcttgcatctgatctgcatgttgtttacttagtgacacccattaatgttgatctggagccagattgggaactgtattaccagaggttcatggagttgtctaccctggatcagtcagttggcaaccgggttggagttcaagaaccctttttgatgcgaatggctcatggtgcaccagttcgtgcatcttataggtcaaatgctggtactaaagggttgcagggaaagttggataacagatccttgaatgaccatatgctgtcagatgagaacatgcttcgcatttgtcggagattctttgtgtctcttatactgtcaaggctcgtccaggaagtgccggttatcgaggtttgtggtgcatttaaagtcgcaaggggcatggttcaggccttacaagaaaatgctggaaggtttgcttccatggtttctgttttttgtgagaggcttggttggcatgaccttgaaggcttagtgtcaaagttccaaaatcgtgtctcatttggtgtgcgggcagagattgtagagctcaccaccattccatatgttaagggttcccgagctcgagcactatataaagcgggtcttcggacacctgaagcaattgctgaagcatcagttcctgagattatcaaagtactttttgagtcttcatcatgggctgaccaaggttctgcacaacggatggtccaattaggagttgcgaaaaagataaaaaatggtgcacgcaagattgttctcgataaagctgaggaagcaaggcttgctgcattctcagctttcaagtcgcttggacttgatgtgtcaacgcttgcacagcctgtcatatctactgctgctggacatggtgctcacaaagaagctagtacctcctctgcagaagggtcgactagtagctttattagcctggagaatgcaaatcgaatctcttccacatccatagaaagaagtaaggaggtcaatatcactattcctgatgctggagcagaaaatgcaaaaagcaaaacaattgctgacaaagaggcatttgatatagaaggatctaatggtcttaagactgaagttaatgaatctactcatcatattgataatgcaaagacttccccctatcctactttaaatattaagggcatcgaaggaggtggtacatgtaatgatcataatcatgctgggaaacaacactgtgaaggagctgaaatatgtaatgtaagagtcaaagaaacatcagagaaagggcctatgaatgcgactgctgttgtcggtggatttgatactttcctgggtctctgggaagctgttgaggagttttactttgatgtccattttagcaaaaagtctgcactgaacagcaatgctccatttgaaatatatggcatagccatttgttgggaagattctcctgtctattatgtaaatcttccgagggacttattttggtccaacagcaaaaggaatagccaattgtcacccattacgaatgatgatattgggaatgttctaccaccaaatcttcagttagagatagcgatacaccgatggaatagaattagtaccataatgagaaaaaaagatataaaaaagtttgcgtggaacttaaaagttcagattcaggtactcaagcatcctactgtttcaatacagagatttggtggtttgagtcttttggtcaaatctcttggagtagatcttattgacaacaattgctatctgttgtctcctgttcccattcaagatgcaattgacttgtgtatagtagcttgggtcctttggcctgatgaggagaaaggttctaaccctagtatagaaaaggaagtgaagaaaaggttatccatcgaggctgctgctgccgctaatcgaaatggtagatggaagaatcagatgcgacaagttgctcataatggttgttgtcgtcgagcagcacaaacacgagccttgcgttctgttctatggaaactagtcatttctgaaggacttgttgaggcacttggagcaactgaaatgccattggtgaatgttcttgcagacatggagctctgcggaataggtgttgacatggaaggatgcctacaggcacgacaaattctgggaagaaagctgaaaattctggaaaaggaagcttacaagttggctggcatgactttttcattgtacacagcagcagaaattgcgaatgtactctatgggcatctacagcttcctgttccagaaggacataaaaagggaaagaagcaccctagtactgataagcattgcttggatttgctaaggaatgaacatccaatagtacctataattaaagagcaccgtactctagcaaaactcttgaattgtacattggggtcgatctgttcacttgctagactatctatgaggacacagagatacacactgcatggccattggctccagacgacaacagcaacagggcgactgtcaatggaggaacctaatcttcagtgtgttgaacatatggttgacttcaaaatgaataacaaggataaaggcgtttgcccgttagatgtcaacaattataagatcaatgctcgtgatttttttgtgtctactcaggataattggttactgttaacagcagattattcccagatagaactgagattgatggcccatttctctaaagattcctcgttgatcgaactgcttagtgaaccccaaggtgatgtcttcaacatgattgctgcaaaatggacaggtaaaacagaggctattgtgagtcaagaggagcgagatcaaactaaaaggttggtttacggcattctttatggaatgggtgctaagagccttgcagaacaaatcgattgtagtgcagatgaagctgctgaaagaattgaaagctttaaaagatcttttccaggtgttgcttcctggctacaggaagcagttacatcttgccgtgagaaaggttatatagagaccctcaagggacgaaagcgtttcttggcaaaaattaactttggaaacagtaaggaaaagtctaaagctcagaggcaagctgtgaattctatctgccaggggtcagctgcggacattatcaagattgcaatgataaacattcactctgtgcttgatcattttgagaaatctctgtcgcattctgcagttgatgaaaagtttcatgtgcttaaaggacgttgtcggattattttacaggttcatgatgaattagtacttgaggctgatccttctgttgcaaaggaagctggattgttgttgcagatgagcatggaaaatgctgtttctcttcttgtcccactgcatgtgaaattgaagattgggagcacatggggatcgttggaacctttccaggccggagaatgataggtttttaagtgtggacatttgttggcaaagttaaaaactattagttgcttcatgctgtttgaacagtatcaacagctgttattttcagttagctctcaagcaagaactttatctaacagaccaagcaaatgatgttcacatgggatgcagctgtataacttcatgtgaattagctggtcatcaaggttataatgtgctctttgttgaagtcataatctcacaatttctgtacaagctaaggatctgttgatggattaggttgcttgaaggaagtgggaaggacagaggaagagactcttcactttattgaacaaatctgcacttgttggtgctctgataaatttgtagaactctgacattcaagtaagtaatattgtgatgagggtgctcagaaccaaggccgcttcaatattcttgagagcatgagatgttaagactctgctgatgacattttcctgattgtctccagagcatgctgcttcatcgtgttgtaagctgaaaagcatcttacagggcgaatgtgcttaattaatgatgattatataaggattctacctcattctcctggatctcagcgaaagcagatgcttaatattgaagtgtcaattaatggcagggtaatacctatcaagagaaccaaggagttggtccaactggtggaagccttctagatgcttaatcctttatgctcaaatttcaaatcctactggaggtgattaatgctctgggctacaagcaatggggttatggtcccctaaaacccaaaagacaagggaaaaagaaatttacagggaagcaacaagcatacgataattacttttccattggctaagccctcaaaatttagttaatgcgaatctcgaggaacatttcgggtttctataaattgtcgtgcgaggatattgaatgtcttctggtgcattttctggtatatgttccctgacatctaatgcatgtggaattggttaatggtgtttagattgttacttgttgtttttctctcttatggaggaacaacctgggacctggaagatccacatccaatcacatcgtacagtgagaatagttagatcaatctcaaggggttggagtctgaaggcatgccacagtggtaggagctttcctggcagtcaaatttgaaaatagagagctcacccagaatggctgttatcattgcttagaagacctcattggaagttagtgttacagtgctatgcgagaactagagaaagattgtcatttggttgatgatcgatcctgcagaggagacgtgaaaattgtattgggaaggtgcatggataaaaattctgacactttgaatctgcttgtggtgtttgtattggaaaggtgcatggataaaaatttctggcattttgaatatgcttggtgctcgagggagacaaacagaggagttttgatggtaaggcgaatctggattattgaattcctattatatagcagtaatactccatgcagtgttcgattgcttgtattgtaaccccaaattgagactactgaccacttattcttttctatttcaaattacaccaattcactacattgttccttgattctgtgttgaggaatattgcaagaaagactaaatctatatgaaaa

SEQ ID NO: 22 - protein, 2144 aa, Solanum lycopersicum
MASDTPRERIDQFFASKKKRKSLSPSLKPTRAKKDVKTIQEVSPSTKGSLNGYLGTSQDDSKSSHIARGAPVKRNLTLEIGPYLKDENKGSTFLVEAQSTTTEAKTSKEEFDIHSDSHVVENRGHGKDVLVTTKVNGNSELKQFATNFLSLYCSELPSSLSLPSAQREGGSKRSGSSPLLEVDNKNAKRVRCISSENDSNLNRRSNSECAALNSIEITEGNTSGEARIILRKCNNIPVIGSTESETPGSTSSKLRIGVTPKSTRGSSIFSPGEAFWNEAIQVADGLFEGSDKFSSQTALESDALKNHNEVINSNSLGNGECGNKSHQVFNEGIVTVSDAGIVSAVASLRKLGKDLDGEKSPMPVKHFDFASDEKNFDSIQSHRSNLDILTISGKITGSQDHLSLSGYPVVSLHKAAQEKGNILELQNKTPKCPVSKGKDVLIQDTDIMASTTPPEKLNSYTDNSLSSKDNTPSSIAPLKNHSDLNHWLPSEVCNIYRKKGISKLYSWQVDCLQVDGVLHNRNLVYCASTSAGKSFVAEILMLRRILSSGKMGLLVLPYVSICAEKAEHLEVLLEPVGKHVRSYYGNQGGGSLPKDTAIAVCTIEKANSLINRLLEEDRLSELGIIVIDELHMVGDQNRGYLLELMLTKLRYASGEGNTESSSGETSGTSSGKVDPAGSLQIVGMSATLPNVTAVADWLQAALYQTEFRPVPLEEYVKVGNTIYNQKMDIVRTISKAADLGGKDPDHIVELCNEVVQEGNSVLIFCSSRKGCESTARHVAKHLKKFSLNQLSGQNESIDITSAIDALRRSPAGLDPILEETLPAGVAYHHAGLTVEERETVETCYRKGLVRVLTATSTLAAGVNLPARRVIFRQPRIGRDFIDGTRYRQMAGRAGRTGIDTKGESVLICKPEEVKRITALVNESCPPLHSCLSEDKNGMIHAILEVVAGGIVQTASDINRYVRCTLLNSTKPFDDVVKSAQDSLRWLCHKKFLGWSEDTKLYTVTPLGRAAFGSSLSPEESLVVLDDLIRAREGFVLASDLHVVYLVTPINVDLEPDWELYYQRFMELSTLDQSVGNRVGVQEPFLMRMAHGAPVRASYRSNAGTKGLQGKLDNRSLNDHMLSDENMLRICRRFFVSLILSRLVQEVPVIEVCGAFKVARGMVQALQENAGRFASMVSVFCERLGWHDLEGLVSKFQNRVSFGVRAEIVELTTIPYVKGSRARALYKAGLRTPEAIAEASVPEIIKVLFESSSWADQGSAQRMVQLGVAKKIKNGARKIVLDKAEEARLAAFSAFKSLGLDVSTLAQPVISTAAGHGAHKEASTSSAEGSTSSFISLENANRISSTSIERSKEVNITIPDAGAENAKSKTIADKEAFDIEGSNGLKTEVNESTHHIDNAKTSPYPTLNIKGIEGGGTCNDHNHAGKQHCEGAEICNVRVKETSEKGPMNATAVVGGFDTFLGLWEAVEEFYFDVHFSKKSALNSNAPFEIYGIAICWEDSPVYYVNLPRDLFWSNSKRNSQLSPITNDDIGNVLPPNLQLEIAIHRWNRISTIMRKKDIKKFAWNLKVQIQVLKHPTVSIQRFGGLSLLVKSLGVDLIDNNCYLLSPVPIQDAIDLCIVAWVLWPDEEKGSNPSIEKEVKKRLSIEAAAAANRNGRWKNQMRQVAHNGCCRRAAQTRALRSVLWKLVISEGLVEALGATEMPLVNVLADMELCGIGVDMEGCLQARQILGRKLKILEKEAYKLAGMTFSLYTAAEIANVLYGHLQLPVPEGHKKGKKHPSTDKHCLDLLRNEHPIVPIIKEHRTLAKLLNCTLGSICSLARLSMRTQRYTLHGHWLQTTTATGRLSMEEPNLQCVEHMVDFKMNNKDKGVCPLDVNNYKINARDFFVSTQDNWLLLTADYSQIELRLMAHFSKDSSLIELLSEPQGDVFNMIAAKWTGKTEAIVSQEERDQTKRLVYGILYGMGAKSLAEQIDCSADEAAERIESFKRSFPGVASWLQEAVTSCREKGYIETLKGRKRFLAKINFGNSKEKSKAQRQAVNSICQGSAADIIKIAMINIHSVLDHFEKSLSHSAVDEKFHVLKGRCRIILQVHDELVLEADPSVAKEAGLLLQMSMENAVSLLVPLHVKLKIGSTWGSLEPFQAGE

SEQ ID NO: 23 - DNA, 6876 bp, Sorghum bicolor
taaactagctctttatgatacagggccaaagtcagactcaatctttcacctccgccgctccgtggctatgcaaaacaattcaaaaagaaactaaacacccttccggaaactttccctccgcaatggcgtcgggctcgtctcggccccaaatcgaccagttcttcccggccaagaagcggaggccctcgtcgcgcaaggacgggtcgccgcgacccgggacgcagcatgagagccccggcggcgccaaggggtccctggagggctacctcgcccgttcgctttccacccgtgccgcggcggcggcatcggtgctccccgtgaggtcgcccagcggcggggacccgggcgccaggcggagcctctcggcagcaatggatgtcgatgtcggttcctcggctccggtggtggcggtggtaggtgacggggcagactttgatctcaggaggagcacggcggacttcttgtcccattcctgcagcgagcagtgggggatgaaacagaagcggagtgcgacccagtcattcttgattccttgtgacaatgactgtgtcaagaagcagcgagttgcccattgtggtggtttggaagctccaaaggagttagatgataacgtggcttccatgaaacaatgcatcaatcaccatggtgggtcagaggctgtggagcaggaatcttttgagggggaacaggtgagttgtgttgggttttcggccttgcaaagatgtagctttaccccaagtactgcacagagaaaagttgggttttctctagcccctgtggaaaccctaaagtctgtatcgaggaattcccttacttcacctggggaggagttctggaatgcagcaattgaactcgctgatgggatatctgcccaagctgataaggtccgcggaaggcctgaatttgatgcagcagaagacaagtcatcttgtgcagtagcagtatgctctaagactctttgtagatcagaaagggatgaacttgactgtcaaaatacagtaggaagcaatgatacacatcatatggagaaattgtcaaataaagttgaatcactggcagtaaacagtcagcatataattaattcccctttgcctgtgaagcagctggatttctttcatgaggatgatattaaagtttcatgttcaaaatttgaagcaaaaggcagctgtgaagcttgtagtgcacaagcagaccatgttacattgaaagacagtggccttctaggaaaggaaaatctcatagaccctgtggatgtgatgaagaaaagtgctagtaatttgcacactgattctgcagccatgaccatgagatgtcagggtgtattcaagtcaacaattgaagggaatgttcacccaactcaagaggatgcaagggattctcatcttattagtagagatctcaatcagccaacccacaataaaaataaatcacttgctgcatattcaaataattgcaagacttgggtagattccaagagtaaatttgcttctgaggaagtggaagctaggacacctagtagctccattcctctgaaggatcagtcaaagctatcaagttggcttcctcctgaactttgtgctatgtacatgaaaaaaggcatttcagagctgtacccttggcaggttgaatgtttacttgtggaaggtgtcttggacaaaaggaatcttgtgtattgtgcatccacgagtgctggtaaaagtttcgtcgctgaagttctgatgttgaggcggatactgtcaagtgggaatgtggcaattcttgtccttccctatgtgtcaatatgtgctgaaaaggctgaacatcttgaacaacttcttgagccactgggtaggcatgtccgtagcttctatgggaaccaggggggaggctcacttcctaaagatactgcagttgctgtatgtaccatagagaaggcaaactctttggtaaacaagttgttggaggatggccgcctctctgaacttggtgtaattgtcatagatgaacttcatatggttggtgaccaacacagagggtatcttttagaactgatgctcacaaagcttcgatatgctgctggtgaagggacttcacagtcatctagcggagaaatttcaggctctagcagtgggaagatggcaagtcatgggttgcagataattggtatgagtgctactatgcccaacattgctgcagtagctgattggcttcaagctgctctttatcaaactgactttcgaccagttccactggaggaattcatcaaagttggtaatcaaatatttgataaagacatgaacgtcgttcgtgtccttcccaaagtagctgaccacggtggcaaggatccagatcatattgttgaactgtgtaatgaggttgttcttcaggggcattctgtgcttttgttttgctccagtcgtaaaggctgtgaatccactgcaagacatgttgccaagttcttgaaactatcctctgttggatcaagtgacgttagttcagagttttcagatgctgctgctgctattgaggccttgaggaggtgccctgctggattggatccaatattgggagaaacccttccttttggtgttgcatatcatcatgctggtcttacggttgaggagagggagattgtggaatcatgctaccgtaaaggccttgtccgtgttctgactgccacttcaactttagctgctggtgttaacttgcctgctagacgggttatattcaggcagcctaagataggtcgtgattttattgatgggactcgctatagacagatggctggccgtgctggtcgaactggaatagacacaaaaggagaaagtatacttgtatgcaggcttgaagaggtcaagagaattacaggtattattagaagcaattgccctcccttggagtcctgcctctcagaagataaaaatggaatgactcatgcaattatggaggttgttgctggtgggattgtgcaaactgcaaatgatattcatcgatatgtgcggtgtaccctgcttaactccacgagaccttttgatgatgtcgtgaagtcagctcaagactcccttcgttggttatgccataaaaggtttcttgattggaaccatgagaccaagatatactccgctactccccttggtagagctgctttcggaagttcactcaaccctgaggaatcactggttgttcttgatgatctttcgagggcaagagaaggctttgttctggcatctgatttgcatttagtttacttggtcacacccataaatgtaggtcttgaacctgattgggaattatattacgagagattcatgcaacttacttctcttgagcagtcagtaggcaatcgggttggagtaatcgaacccttcttgatgcacatggctcatggagcatccatgcctgtttgtggaaggcctcagagaaacactggtttaagtaacaagtcagcacaagccggtggaaatgctcttgttagtgagcatacactcagagtgtcaaagcgcttttatgtggctttgatgttatcgaggcttgctcaggagattcctattgctgatgtttgtgagacatttaaggttgccagaggtatgattcaggcgctgcaggaaaatgctggcaggtttgcttcaatggtctctgcattttgtcaaagacttggttggaatgatttagaaggccttgtttcgaaattccaaaatcgtgtttcttttggagttagggcagagattgccgaactgacatcaattccatttgtcaagggctcacgtgcaagggctttgtacaagtctggtctgcgtactcctgttgccattgctgaagcatctattcctgaaattgcaaaagctctttttgaatcttctgcttggtctgggcaagattctggtttacaacgaatgcaatttggtatagccaagaaaataaaaaacggagctcgcaaaattgtcctggaggaggcagaagccgccagagtagcagcattctcagctttcaagtcacttggtgtggaagttcctcagttcactgcacctccacttgcagctgttgaggactatccaactcgagataccatagaccaagctaagtccaacaagctagcttttggtacccatgctagagatgataaaaataagaatagctgctctgattatgctaccccaaggggttctacatacagtctaagaaaggatgcaaaccctgctccttccattcaaatgagagagaatgcaggactatctaaaaatgtgaaaatcactagacagggaggagcatcatctttgtcaacagaaattgctgatggattgagtagtagagatgtggctgacagaggccctgtccaagcatataacttcccagggggctttgactgttttcttgatcaatggtctgctgctagccattttttcttcgatgtccattttatcaggagatcgctgaaaccatcttcgaacctttttgaagtttttgggttggctgtctgttgggaaaattcccccatatactactgcaacttcccaaaagatctagtcactactagtaacaatgacttcagggaaatgtggggtaattttcagagaagatgggaaaaaataactgacattatgcaacaaaagagtgtccagaaaatgacatggaatttaaagatccagattcaggcacttaaatcaccttatatctcttgccaacggcttgaaaggtttcatcttgaccataaaatgctagacaaagttgaagtgcttgacaactcatatgtgttgttatcaccagtctctgtctacaatggattggatatatgtctgctggcgtgggttctatggcctgatgaggaaagcagaacggtaccaaatctcgagaagtttgtcaagagacgacttcatagtgaagctgctgctgctgcaaatcgtgatggaagatggagaaatcagatgcacaaagcagcacacaatggatgctgtagacgttctgcacagacacgagctttgtatactgttctgaagaaattacttactcaaaatctttctgatttggttgaaacaatcgaggccccgttggttaatgttcttgctgatatggaactttggggaattggcgctgacatggatgcttgtctccatgcgaggcatattataacaaaaaagctaaaggaactggagaaagaagcttacagattagcaggcaagaatttctctctaaatgctactgctgacatcgcagacattctatatgtacacctaaaattgccagttccaaaaggttgtgagaaagggaagctgcatcctagcactgacaagcagtccttggaccatctaagggatcaacacccaattatcccagtaattaaggaacacagaacattagcaaaactgttaaatggcacattgtggtccatttgctcacgtgctcaattgtgcacgcaatcacaaaggtacatcatacatggtaattggcttcagacatcaactgccactggccgtttgtccatggaggagccaaatctgcagtgtgttgagcacttggtggaattcgatacagggaaaagcaataaagattactgcatgtcagtggatgatcatcataaaatcaatgtccgtgattttttcataccgaccaaggagaactggttatttgtaactgctgattactcacagattgagttgcgtttaatggctcacttttctaaagatcctacattggttgaacttctaagtaaacctgatggtgatgtttttaccatgattgcttcaagatgggctgataaagaagaggctttgatatcttccaaagagagagagaacactaaaagattgatatacggcatcctttatggaatgggtgcaaattcccttgcagaacaacttgagtgcagcactgaagatgctgcacagaagattcaaagctttaggagattatttcctggtgtttcctcatggttacatgaagttgtgttatcttgtcgccaaaaaggatatgtggagactttattgggccgccgacgttttcttacaaaaataacggctggcaatagcaaagagaaagctaaagcacagagacaagctgtaaattctatttgccagggttctgctgctgatattatcaaggtggctatgattagacttcattcagtaattaccaacagaactagggcaactgattccacagatgaagttacaagaaaattttcagaatttggtggccagtgtcaccttattttgcaggtgcatgacgagttggtattggaagttgttccatgcatggtagcacaggctggaaggctgttacagatatgtatggaagaagcagcttcactattggtacctttgcgcacaaaaataaaggtgggaaaaacttggggttcactagaacccttctatcctgagccttgttgatgcaaatggtgaatgtcacttggagtaagctacatggatgccaatttttcatgacatgcaagggcctagatgatttttctgtaagaaggctgaacaagttccaatatgccccactgggaccatgtgtccagctccattactgagaatttgctatggacttgtggttatgatggatggtccatgtggtatgccagaagcaattatatatatctaggccttttgtatatcatatcaccaatagatgctgtcaaagggcgtgctggcatctcttggaggtgcatttggtttgatggatatcctcatggaaaagggatgtttggttcgcttacgagttggatatagatataggtgttggtatccctgccaccaaaaaattgcctagcgagttcatccatgttttgtaatctgtcattagcaaaaaaattatggattattggtttgtgatattgttacttgtaattatgatagcaatattatatttgataagtgtgaatatgcatgttttgtatgccaa

SEQ ID NO: 24 - protein, 2115 aa, Sorghum bicolor
MIQGQSQTQSFTSAAPWLCKTIQKETKHPSGNFPSAMASGSSRPQIDQFFPAKKRRPSSRKDGSPRPGTQHESPGGAKGSLEGYLARSLSTRAAAAASVLPVRSPSGGDPGARRSLSAAMDVDVGSSAPVVAVVGDGADFDLRRSTADFLSHSCSEQWGMKQKRSATQSFLIPCDNDCVKKQRVAHCGGLEAPKELDDNVASMKQCINHHGGSEAVEQESFEGEQVSCVGFSALQRCSFTPSTAQRKVGFSLAPVETLKSVSRNSLTSPGEEFWNAAIELADGISAQADKVRGRPEFDAAEDKSSCAVAVCSKTLCRSERDELDCQNTVGSNDTHHMEKLSNKVESLAVNSQHIINSPLPVKQLDFFHEDDIKVSCSKFEAKGSCEACSAQADHVTLKDSGLLGKENLIDPVDVMKKSASNLHTDSAAMTMRCQGVFKSTIEGNVHPTQEDARDSHLISRDLNQPTHNKNKSLAAYSNNCKTWVDSKSKFASEEVEARTPSSSIPLKDQSKLSSWLPPELCAMYMKKGISELYPWQVECLLVEGVLDKRNLVYCASTSAGKSFVAEVLMLRRILSSGNVAILVLPYVSICAEKAEHLEQLLEPLGRHVRSFYGNQGGGSLPKDTAVAVCTIEKANSLVNKLLEDGRLSELGVIVIDELHMVGDQHRGYLLELMLTKLRYAAGEGTSQSSSGEISGSSSGKMASHGLQIIGMSATMPNIAAVADWLQAALYQTDFRPVPLEEFIKVGNQIFDKDMNVVRVLPKVADHGGKDPDHIVELCNEVVLQGHSVLLFCSSRKGCESTARHVAKFLKLSSVGSSDVSSEFSDAAAAIEALRRCPAGLDPILGETLPFGVAYHHAGLTVEEREIVESCYRKGLVRVLTATSTLAAGVNLPARRVIFRQPKIGRDFIDGTRYRQMAGRAGRTGIDTKGESILVCRLEEVKRITGIIRSNCPPLESCLSEDKNGMTHAIMEVVAGGIVQTANDIHRYVRCTLLNSTRPFDDVVKSAQDSLRWLCHKRFLDWNHETKIYSATPLGRAAFGSSLNPEESLVVLDDLSRAREGFVLASDLHLVYLVTPINVGLEPDWELYYERFMQLTSLEQSVGNRVGVIEPFLMHMAHGASMPVCGRPQRNTGLSNKSAQAGGNALVSEHTLRVSKRFYVALMLSRLAQEIPIADVCETFKVARGMIQALQENAGRFASMVSAFCQRLGWNDLEGLVSKFQNRVSFGVRAEIAELTSIPFVKGSRARALYKSGLRTPVAIAEASIPEIAKALFESSAWSGQDSGLQRMQFGIAKKIKNGARKIVLEEAEAARVAAFSAFKSLGVEVPQFTAPPLAAVEDYPTRDTIDQAKSNKLAFGTHARDDKNKNSCSDYATPRGSTYSLRKDANPAPSIQMRENAGLSKNVKITRQGGASSLSTEIADGLSSRDVADRGPVQAYNFPGGFDCFLDQWSAASHFFFDVHFIRRSLKPSSNLFEVFGLAVCWENSPIYYCNFPKDLVTTSNNDFREMWGNFQRRWEKITDIMQQKSVQKMTWNLKIQIQALKSPYISCQRLERFHLDHKMLDKVEVLDNSYVLLSPVSVYNGLDICLLAWVLWPDEESRTVPNLEKFVKRRLHSEAAAAANRDGRWRNQMHKAAHNGCCRRSAQTRALYTVLKKLLTQNLSDLVETIEAPLVNVLADMELWGIGADMDACLHARHIITKKLKELEKEAYRLAGKNFSLNATADIADILYVHLKLPVPKGCEKGKLHPSTDKQSLDHLRDQHPIIPVIKEHRTLAKLLNGTLWSICSRAQLCTQSQRYIIHGNWLQTSTATGRLSMEEPNLQCVEHLVEFDTGKSNKDYCMSVDDHHKINVRDFFIPTKENWLFVTADYSQIELRLMAHFSKDPTLVELLSKPDGDVFTMIASRWADKEEALISSKERENTKRLIYGILYGMGANSLAEQLECSTEDAAQKIQSFRRLFPGVSSWLHEVVLSCRQKGYVETLLGRRRFLTKITAGNSKEKAKAQRQAVNSICQGSAADIIKVAMIRLHSVITNRTRATDSTDEVTRKFSEFGGQCHLILQVHDELVLEVVPCMVAQAGRLLQICMEEAASLLVPLRTKIKVGKTWGSLEPFYPEPC

SEQ ID NO: 25 - DNA, 8757 bp, Homo sapiens
gagtttgaagactggcgggaagatgtccgcagctgttgccaggccagggttctcccgagagggaggacgctgggactgtggcttgccctgatcggccgagaagagtttgccatgaatcttctgcgtcggagtgggaaacggcggcgttcagaatcaggctcagattcgttctcgggaagcggcggtgacagcagtgccagcccccagttcctctccgggtccgtgctgagcccgccgcccggccttggtcgctgcctgaaggccgcagctgcaggagaatgcaagcctacagttcctgactacgaaagagacaagctactattggcaaactggggacttcctaaagcagttctggaaaaataccacagttttggtgtaaaaaagatgtttgaatggcaggcagagtgccttttgcttggacaagtcctggaaggaaagaatttagtttattcagctcctacaagtgctgggaagactcttgtggcagaattacttattttgaagcgggttttggaaatgcggaagaaagctttgtttattcttccctttgtttctgtggctaaagagaagaaatactacctccagagtctgtttcaggaagtaggaataaaagtagacggttatatgggcagcacctctccatcaaggcatttctcttcattggatattgcagtctgcacaattgagagagccaatggtctgatcaatcgcctcatagaggaaaataagatggatctgttaggaatggtggttgtggatgaattacatatgctgggagactctcaccgagggtatctgctggaacttttgctgaccaagatttgctatattactcggaaatcagcatcttgtcaggcagatctagccagttctctgtctaatgctgtgcaaatcgttggcatgagtgctacccttcctaatttggagcttgtggcttcctggttgaatgctgaactctaccataccgactttcgccctgtaccgcttttggagtcagtaaaagttggaaattccatatatgactcttcaatgaaacttgtgagggaatttgagcccatgctacaagtgaagggagatgaggaccatgttgttagtttatgttatgagacgatttgtgataaccattcagtattacttttttgtccatcaaagaaatggtgtgagaagctggcagatatcattgctcgagagttttataatctacatcatcaagctgagggattggtgaaaccctctgaatgcccaccagtaattctggaacaaaaagaactcctggaagtgatggatcagttaagacgtttgccttcaggactggactctgtattacagaaaactgtaccatggggagtagcatttcatcatgcaggtcttacttttgaggagagggatatcattgaaggagcctttcgtcaaggtctcattcgggtcttggcggcaacttctactctttcttctggggtgaatttacctgcacgtcgtgtgattattcgaacccctatttttggtggtcgacctctagatattcttacttataagcagatggttggccgtgctggcaggaaaggagtggacacagtaggcgagagtatcttaatttgtaagaactctgagaaatcaaaaggcatagctctccttcagggttctctaaagcctgttcgcagctgtctgcaaagacgagaaggagaagaagtaactggcagcatgatacgagctattctggagataatagttggtggagtggcaagtacatcacaagatatgcatacttatgctgcctgcacatttttggctgcaagtatgaaagaagggaagcaaggaattcagagaaatcaagagtctgttcagcttggagcgattgaggcctgtgtgatgtggctactagaaaatgaattcatccagagtacagaagccagtgatggaacagaaggaaaggtgtatcatccaacacatcttggttcggccactctttcttcttcactttctccagctgatactttagatatttttgctgacctgcaaagagcaatgaagggctttgttttagagaatgatcttcatattctctatctggttacacctatgtttgaggattggactactattgattggtatcgatttttctgtttatgggagaagttgccaacttcaatgaaaagggtggcagagctagtgggagttgaagaggggttcttggcccgttgtgtgaaaggaaaagtagtagccagaactgagagacagcatcgacaaatggccatccataaaaggtttttcaccagtcttgtgctattagatttaatcagtgaagttcccttaagggaaataaatcagaaatatggatgcaatcgtgggcagattcaatctttgcaacagtcagctgctgtttatgcagggatgattacagtattttccaaccgtctgggctggcacaacatggaactactactttcccaatttcagaagcgtcttacgtttggcatccagagggagctgtgtgacctggttcgggtatccttactaaatgctcagagagccagggttctctatgcttctggctttcatactgtggcagaccttgctagagcaaatattgtggaggtggaggtgattctgaaaaatgctgtgcctttcaaaagtgcccggaaggcagtggatgaggaagaggaagcagttgaagaacgtcgcaatatgcgaactatctgggtgactggcagaaaaggtttaactgaaagggaagcagcagcccttatagtggaagaagccagaatgattctgcagcaggacttagttgaaatgggagtgcaatggaatccatgtgccctgttacattctagtacatgctcattgactcatagtgagtccgaagtaaaggaacacacatttatatcccaaactaagagttcttataaaaaattaacatcaaagaacaaaagtaacacaatatttagtgattcttatattaagcattcaccaaatatagtgcaagacttaaataaaagtagagagcatacaagttcctttaattgtaatttccagaatgggaatcaagaacatcagacatgttccattttcagagcaagaaaacgggcctctttagatataaataaagagaagccaggagcctctcagaatgaggggaaaacaagtgataagaaagttgttcagactttttcacagaaaacaaaaaaggcacctttgaatttcaattcagaaaagatgagcagaagttttcgatcttggaaacgtagaaagcatctaaagcgatctagggacagcagccccctgaaagactctggagcgtgtagaatccatttacaaggacagactctgtctaatcctagtctttgtgaagacccgtttaccttagatgagaagaaaacggaatttagaaattcagggccatttgctaaaaatgtatctttgagtggtaaggaaaaagataataaaacatcattcccattacaaataaagcaaaattgttcatggaacataacactaactaatgataattttgtggagcatattgtcacaggatctcagagtaaaaatgtgacttgtcaggccactagtgtggttagtgaaaagggcagaggagtagctgttgaggcagaaaaaataaatgaagtgctgatacaaaatggttcaaaaaaccagaatgtttatatgaaacaccatgacatccatccaattaaccagtacctgcgaaagcaatctcatgaacagacaagcactattaccaaacagaaaaatataatagagagacaaatgccctgtgaagcagtcagtagttacataaatagagactcaaatgttactatcaattgtgaaaggataaagcttaatacagaggaaaataaaccaagtcattttcaggcattaggagatgatataagcagaactgtgatacccagtgaagtacttccatcagctggagcatttagcaaatcagaaggccagcatgagaattttctaaatatttctagactacaagaaaaaacaggtacttatacaacaaacaaaactaaaaataatcatgtttctgacttaggtttagtcctctgtgattttgaagatagtttctatctggatactcagtcagagaaaataatacaacagatggcaactgaaaatgccaaactaggagcaaaggacaccaacctggcagcagggataatgcagaagagcttagtccaacagaactcaatgaactcttttcagaaggagtgtcacattccttttcctgctgaacagcaccctctaggagcgactaagatagatcatttggaccttaagactgtaggtactatgaaacaaagcagtgattcacatggggttgatatcctgactccagaaagcccgattttccattctccaatactattggaggaaaatggtctttttttaaaaaagaatgaagtttctgttactgattcacaattaaatagttttcttcaaggttatcaaacacaagaaactgtgaaaccagttatacttctgattcctcaaaagagaactcccactggtgtagaaggagaatgtcttccagttcctgaaacaagtttgaatatgagtgatagtttactatttgatagcttcagtgatgactatctagtaaaagaacaattacctgatatgcaaatgaaagaaccccttccttcagaagtaacatcaaaccattttagtgattctctgtgtctacaagaagacctaattaaaaaatcaaatgtaaatgagaatcaagatacccaccagcagttgacttgttccaatgatgaatctattatattttcagaaatggattctgttcagatggttgaagctttggacaatgtggatatatttcctgtccaagagaagaatcatactgtagtatctcctagagcattagaactaagtgatccagtacttgatgagcaccaccaaggtgatcaagatggaggagatcaagatgaaagggctgaaaaatcaaaattaactgggaccaggcaaaatcattcattcatatggtcaggggcatcatttgatctaagtccaggactgcaaaggattttagataaagtatccagtcctctagaaaatgaaaagctaaaatcaatgactataaacttttccagtttgaatagaaaaaatacagagttaaatgaagaacaagaagttatttcaaacttggagacaaaacaagtgcagggaatttcattttcttctaataatgaagtaaaaagcaagattgagatgctagaaaacaatgccaatcatgatgaaacctcatccctcttacctcgtaaagaaagtaatatagttgatgataatggtctcattcctcctacacccattccaacatctgcttctaagctgacatttccagggattcttgaaacacctgtaaacccttggaaaactaataatgttttacaacctggtgaaagttatttatttggctcaccttcagatattaaaaaccacgatttaagtccagggagtagaaatgggttcaaagacaacagccctattagtgacacaagcttttcacttcagttatcacaggatggattacagttaactccagcctcaagcagttcagaaagtttgtccataattgatgtagcaagtgaccaaaatcttttccaaacattcattaaggagtggcggtgcaaaaagcgattttccatctcactggcttgtgaaaagattagaagtttgacatcttctaaaactgctactattggcagtaggtttaagcaagctagctcacctcaggaaattcctattagagatgatggatttcccattaaaggttgtgatgacaccttggtggttggactggcagtatgctggggtggaagggatgcctattatttttcactgcagaaggaacaaaagcattctgaaattagtgccagtttggttccaccttctttagatccaagcctgactttgaaagacaggatgtggtaccttcaatcttgcttgcgaaaggaatctgataaagaatgttctgttgtcatctatgacttcatccagagctataaaattcttcttctttcttgtggcatctccttggagcaaagttatgaagatcctaaggtggcatgctggttactagatccagattctcaggagccgactcttcatagcatagttaccagttttcttcctcatgagcttccactcctagaagggatggagaccagccaagggattcaaagcctggggctaaatgctggcagtgagcattctgggcgatacagagcatctgtggagtccattctcatcttcaactctatgaatcagctcaactctttgttgcagaaggaaaaccttcaagatgttttccgtaaggtggaaatgccctctcagtactgcttggccttgctagaactaaatggaattggctttagtactgcagaatgtgaaagtcagaaacatataatgcaagccaagctggatgcaattgagacccaggcctatcaactagctggccacagtttttctttcaccagttcagatgacatcgctgaggttttatttttggaattgaagttgcccccaaatagagagatgaaaaaccaaggcagcaagaaaactctgggttctaccagaagagggattgacaatggacgcaagctaaggctgggaagacagttcagcactagtaaggacgttttaaataaattaaaggcattacatcctttaccaggcttgatattagaatggagaagaatcactaatgctattaccaaagtggtctttccccttcagcgggaaaagtgtcttaatccttttcttggaatggaaagaatctatcctgtatcacagtcgcacactgctacaggacgaataacctttacagaaccaaatattcagaatgtgccaagagattttgaaatcaaaatgccaacactagtaggagaaagcccaccttctcaagctgtaggcaaaggcctacttcccatgggcagaggaaaatataagaagggtttcagcgtgaatcctagatgccaggcacagatggaggagagagctgcagacagaggaatgccattttcaattagcatgcgacatgcctttgtgcctttcccaggtggttcaatactggctgctgactactctcagcttgaactgaggatcttggctcatttatcccatgatcgtcgtctcattcaagtgttaaacactggagctgatgttttcaggagcattgcagcagagtggaagatgattgagccagagtctgttggggatgatctgaggcagcaggcaaaacagatttgctatgggatcatttatggaatgggagctaaatctttgggagagcagatgggcattaaagaaaatgatgctgcatgctatattgactccttcaaatccagatacacagggattaatcaattcatgacagagacagtgaagaattgtaaaagagacggatttgttcagaccattttgggaaggcgtagatatttgccaggaatcaaagacaacaacccttatcgtaaagctcacgctgagcgtcaagctatcaacacaatagtccaaggatcagcagctgatattgtcaaaatagccacagttaacattcagaagcaattagagaccttccactcaaccttcaaatcccatggtcatcgagagggtatgctccaaagtgaccaaacaggattgtcacgaaagagaaaactgcaagggatgttctgcccaatcagaggaggcttcttcatccttcaactccatgatgaactcctatatgaagtggcagaagaagatgttgttcaggtagctcagattgtcaagaatgaaatggaaagtgctgtaaaactgtctgtgaaattgaaagtgaaagtgaaaataggcgccagctggggagagctaaaggactttgatgtgtaactgtgctgttgatgaagtcctcccagggaagcctgtgcagatgcagtcacctggaaagaacagagattaccctttcacctacctcagcaaaacaaactttcaagtcttgatagacttagcctagtaattttatagtgagagtttcaaactatatatcagtgtctatagcatcaaaaacttctgggggcgtgggggaagtagaataccaagtataatagttacattcactttcaaagagcatctatgaatttgccttttgtaacttactgtggctttaaacatattcagaacagatgcttgaaatatgcacttagcactttggttccacatctgtctgggtaaaccatgaagaaaatgaagctgctgcctcaatcgacccagacagcagccataggcagataaagatttggtttcaccctggtggtggtaggcatcgtgtgtgactttttttcctctaatatcaattttacagtacggaaatagtattttaaaatagtattggctaataaattatgaattctataaagtagtaagacttggtatggttggagtgtaggaatgaatattcatgaaatgtttcttattgcttttccttccctaattcatacaatgaatgtatttggaatacttacatattataaaataaactatacctcttcaagaggtatcctgttctgtaagatcagatgtttttattgcaggtcaatataatactgccagagacagaaaatacccccttatcagtcccttagtgcctctttctgtttgtggcatggtgagaaaacccatgctgaaaagattgtactttgtgatcccaatcagagggatggagctaatctttttgctgttgaaataaaatgaatttatgagaaa

SEQ ID NO: 26 - protein, 2590 aa, Homo sapiens
MNLLRRSGKRRRSESGSDSFSGSGGDSSASPQFLSGSVLSPPPGLGRCLKAAAAGECKPTVPDYERDKLLLANWGLPKAVLEKYHSFGVKKMFEWQAECLLLGQVLEGKNLVYSAPTSAGKTLVAELLILKRVLEMRKKALFILPFVSVAKEKKYYLQSLFQEVGIKVDGYMGSTSPSRHFSSLDIAVCTIERANGLINRLIEENKMDLLGMVVVDELHMLGDSHRGYLLELLLTKICYITRKSASCQADLASSLSNAVQIVGMSATLPNLELVASWLNAELYHTDFRPVPLLESVKVGNSIYDSSMKLVREFEPMLQVKGDEDHVVSLCYETICDNHSVLLFCPSKKWCEKLADIIAREFYNLHHQAEGLVKPSECPPVILEQKELLEVMDQLRRLPSGLDSVLQKTVPWGVAFHHAGLTFEERDIIEGAFRQGLIRVLAATSTLSSGVNLPARRVIIRTPIFGGRPLDILTYKQMVGRAGRKGVDTVGESILICKNSEKSKGIALLQGSLKPVRSCLQRREGEEVTGSMIRAILEIIVGGVASTSQDMHTYAACTFLAASMKEGKQGIQRNQESVQLGAIEACVMWLLENEFIQSTEASDGTEGKVYHPTHLGSATLSSSLSPADTLDIFADLQRAMKGFVLENDLHILYLVTPMFEDWTTIDWYRFFCLWEKLPTSMKRVAELVGVEEGFLARCVKGKVVARTERQHRQMAIHKRFFTSLVLLDLISEVPLREINQKYGCNRGQIQSLQQSAAVYAGMITVFSNRLGWHNMELLLSQFQKRLTFGIQRELCDLVRVSLLNAQRARVLYASGFHTVADLARANIVEVEVILKNAVPFKSARKAVDEEEEAVEERRNMRTIWVTGRKGLTEREAAALIVEEARMILQQDLVEMGVQWNPCALLHSSTCSLTHSESEVKEHTFISQTKSSYKKLTSKNKSNTIFSDSYIKHSPNIVQDLNKSREHTSSFNCNFQNGNQEHQTCSIFRARKRASLDINKEKPGASQNEGKTSDKKVVQTFSQKTKKAPLNFNSEKMSRSFRSWKRRKHLKRSRDSSPLKDSGACRIHLQGQTLSNPSLCEDPFTLDEKKTEFRNSGPFAKNVSLSGKEKDNKTSFPLQIKQNCSWNITLTNDNFVEHIVTGSQSKNVTCQATSVVSEKGRGVAVEAEKINEVLIQNGSKNQNVYMKHHDIHPINQYLRKQSHEQTSTITKQKNIIERQMPCEAVSSYINRDSNVTINCERIKLNTEENKPSHFQALGDDISRTVIPSEVLPSAGAFSKSEGQHENFLNISRLQEKTGTYTTNKTKNNHVSDLGLVLCDFEDSFYLDTQSEKIIQQMATENAKLGAKDTNLAAGIMQKSLVQQNSMNSFQKECHIPFPAEQHPLGATKIDHLDLKTVGTMKQSSDSHGVDILTPESPIFHSPILLEENGLFLKKNEVSVTDSQLNSFLQGYQTQETVKPVILLIPQKRTPTGVEGECLPVPETSLNMSDSLLFDSFSDDYLVKEQLPDMQMKEPLPSEVTSNHFSDSLCLQEDLIKKSNVNENQDTHQQLTCSNDESIIFSEMDSVQMVEALDNVDIFPVQEKNHTVVSPRALELSDPVLDEHHQGDQDGGDQDERAEKSKLTGTRQNHSFIWSGASFDLSPGLQRILDKVSSPLENEKLKSMTINFSSLNRKNTELNEEQEVISNLETKQVQGISFSSNNEVKSKIEMLENNANHDETSSLLPRKESNIVDDNGLIPPTPIPTSASKLTFPGILETPVNPWKTNNVLQPGESYLFGSPSDIKNHDLSPGSRNGFKDNSPISDTSFSLQLSQDGLQLTPASSSSESLSIIDVASDQNLFQTFIKEWRCKKRFSISLACEKIRSLTSSKTATIGSRFKQASSPQEIPIRDDGFPIKGCDDTLVVGLAVCWGGRDAYYFSLQKEQKHSEISASLVPPSLDPSLTLKDRMWYLQSCLRKESDKECSVVIYDFIQSYKILLLSCGISLEQSYEDPKVACWLLDPDSQEPTLHSIVTSFLPHELPLLEGMETSQGIQSLGLNAGSEHSGRYRASVESILIFNSMNQLNSLLQKENLQDVFRKVEMPSQYCLALLELNGIGFSTAECESQKHIMQAKLDAIETQAYQLAGHSFSFTSSDDIAEVLFLELKLPPNREMKNQGSKKTLGSTRRGIDNGRKLRLGRQFSTSKDVLNKLKALHPLPGLILEWRRITNAITKVVFPLQREKCLNPFLGMERIYPVSQSHTATGRITFTEPNIQNVPRDFEIKMPTLVGESPPSQAVGKGLLPMGRGKYKKGFSVNPRCQAQMEERAADRGMPFSISMRHAFVPFPGGSILAADYSQLELRILAHLSHDRRLIQVLNTGADVFRSIAAEWKMIEPESVGDDLRQQAKQICYGIIYGMGAKSLGEQMGIKENDAACYIDSFKSRYTGINQFMTETVKNCKRDGFVQTILGRRRYLPGIKDNNPYRKAHAERQAINTIVQGSAADIVKIATVNIQKQLETFHSTFKSHGHREGMLQSDQTGLSRKRKLQGMFCPIRGGFFILQLHDELLYEVAEEDVVQVAQIVKNEMESAVKLSVKLKVKVKIGASWGELKDFDV

SEQ ID NO: 27 - DNA, 3285 bp, Beta vulgaris
atggctgcttccaatgaacccccggagaattggcgtgagttccttcaaagagtagaggctgataagcgcgagtctacagcgcgcatggcactactacaagaccaagtgaggcaactctctttgaggttgaggctcaataggggagatcaagaattcccagaagatgaaggtgatccccactcctttaacaatgatcaacctggcgctaccccaagaaggaaccacaaccaaaataactcgagtgatattaaggtggatatcccagattatgatgggaggctagatgctgatggtttcattgagtggctacgaacagtggagcgagtctttgactataagcaagtacctggagagaagagagtcaaattggtggctttaaaattgcgcaggtatgcatctacttggtgggcaagtgtgtgtactaagcgagaaagaatgggtaaggagaaggtgaggacttgggagaaaatgagaaagcttctcaagcagaagttcctacctacgtattatgttcaagaaaactttgccaagtttcaccatctacaccaaggaagtagtagtgtggaagattatgcccgagagtttgaatcatacttaatgaagtgtgatgtgagagaagatgagccacaaactttggtgcggttccttggaggattggagtctcaaatagctaatgtcgtggagcttcatacctattccacattggaggagttagtattgctagcacacaaggtggaacgccaacaaaagaccaaaggtaaagggaaatgggagccctcacgttcatttaccaaaaccacaccttacactaaaccaaaccctaccactcaaaaacctaaccaacctactgcaactatccctaaaactaaccaaaaacccgacacccctctttcacttaataaagcaccaaggagatgttatagatgtcaagggttaggccatattgccagtgaatgtcctaacaagaagattgtgagccttgcggagtatgaggctttagaggaggagaatgaagaacaaggagaggaggaggagtctggagaggagtatgaagcagggagaattattggtccagatgagggagagtgcttggtggttagacgaagccttagtagcctaccaatccatgaggatcaactacaacgcgaggccatattccatacacgctgcaccatcgagggaaaggtatgctctttgattatagatggtggtagttgcacaaatgttgcctctcaaactcttgtaactaagctaaacttaaccactaaacctcacccttcaccctacattattcagtggcttaatcaaggtaaaggtttacatgtaacctcacgtgtacttctttcttttagcattggccgaacttatgaggaggagttatggtgtgatgttattccaatggatgcttgtcatgtacttctaggtagaccgtggatgtttgatagaagagtgagtcatgatggctacaaaaacacatattccttcactaaaaaccacaaacgaatcaccctcacccctctcattcccaaatcatccgaaaaccaaaacctccctactaagaaaaccctatctcttaccatcttaatgaaatctgctcatcaagaatatgattctttcaaagagttgatattgagtggtcttgatgataccccaacaccacaagaacccaaacaccctctactcattcctctacttgaccaatatactcacgttttcccttcacaaatacctcctggccttcccccaaaacgtgacatacaacataaaattgacctcatcccaggtgctagtcttcctaacaaaccagcctatagaaccaaccctaaagaaactgaggagattaggagacaagtggaagagttgttgtctaaaggaatgattcgagaatccttgagtccttgtgctgttcctaccctattagtgccaaagaaaaatggagagtggcgtatgtgtgtggatagtagggctatcaataagatcacaatcaagtatcgttttcctatacctaggttaaatgatttattggatgacctacatggtgctaagatcttttcaaagatagacctaaggagtggataccatcaaatccgtatacatgaaggggatgaatggaagacagccttcaagacaaaggagggcttatatgaatggctagttatgccatttggattgtcaaatgcccctagcactttcatgcgcctaatgaaccaaacattgaagccattcttggggcgctttgtagttgtatactttgatgatatcttggtctatagccacactgaaatggagcatgtagagcacttgaaacaagttttcgaagtattggagggagagaaactttatggtaacttggagaagtgccaattcttttctaaccaagtaacttttcttggctttgtagtttctcatgcaggtattgaagcagatgagaagaaggtgcacgccatccgagattgggcagttcctagttccatttatcaagttaggagcttccatggcttggcttccttttataggaggtttgttcgagattttagctcactcatggcaccaattaccgagctaactaagctaaaacattttcaatggaatgaacaagcacaaaaggcctttgaagaggttaagaggaggctcactacagctcctatctttgcccttcctaactttgaagaagtctttgagattgaatgtgatgcctcgggagtaggcattggggctgtgctatcacaaaatgggcgccctatagcctattttagtgaaaaactcaatgaagcaaaacgcaaatactctacctatgacaaggaattctatgcccttgtgagatctcttgaacattggcgccattatctaatagccaaggagtttatccttcattctgaccatgaagctctcaagtatttacaaagccaacaaaagctccagccaaggcacgccaagtgggttgaaaccatgcaagctttccactttgtaatcaaacataagtctgggaagatgaacaaaggagctgacgctttatcaaggaagtatgctttgctaggctctctaaagggacgtgtcattagccttgaagttttaaaggagggctataaagatgaccctgattttggtgagttatgggagaagtgtcaaatccatgcccaaggagactaccatatatttgatgagttccttttccagaagaaccggttgtgtgtgccaaaacatagtgtgcgtgagaccctaattaaggagtttcatgagggaggattagcaggtcactttggtattgagaagaccacaacattg

SEQ ID NO: 28 - protein, 1095 aa, Beta vulgaris
MAASNEPPENWREFLQRVEADKRESTARMALLQDQVRQLSLRLRLNRGDQEFPEDEGDPHSFNNDQPGATPRRNHNQNNSSDIKVDIPDYDGRLDADGFIEWLRTVERVFDYKQVPGEKRVKLVALKLRRYASTWWASVCTKRERMGKEKVRTWEKMRKLLKQKFLPTYYVQENFAKFHHLHQGSSSVEDYAREFESYLMKCDVREDEPQTLVRFLGGLESQIANVVELHTYSTLEELVLLAHKVERQQKTKGKGKWEPSRSFTKTTPYTKPNPTTQKPNQPTATIPKTNQKPDTPLSLNKAPRRCYRCQGLGHIASECPNKKIVSLAEYEALEEENEEQGEEEESGEEYEAGRIIGPDEGECLVVRRSLSSLPIHEDQLQREAIFHTRCTIEGKVCSLIIDGGSCTNVASQTLVTKLNLTTKPHPSPYIIQWLNQGKGLHVTSRVLLSFSIGRTYEEELWCDVIPMDACHVLLGRPWMFDRRVSHDGYKNTYSFTKNHKRITLTPLIPKSSENQNLPTKKTLSLTILMKSAHQEYDSFKELILSGLDDTPTPQEPKHPLLIPLLDQYTHVFPSQIPPGLPPKRDIQHKIDLIPGASLPNKPAYRTNPKETEEIRRQVEELLSKGMIRESLSPCAVPTLLVPKKNGEWRMCVDSRAINKITIKYRFPIPRLNDLLDDLHGAKIFSKIDLRSGYHQIRIHEGDEWKTAFKTKEGLYEWLVMPFGLSNAPSTFMRLMNQTLKPFLGRFVVVYFDDILVYSHTEMEHVEHLKQVFEVLEGEKLYGNLEKCQFFSNQVTFLGFVVSHAGIEADEKKVHAIRDWAVPSSIYQVRSFHGLASFYRRFVRDFSSLMAPITELTKLKHFQWNEQAQKAFEEVKRRLTTAPIFALPNFEEVFEIECDASGVGIGAVLSQNGRPIAYFSEKLNEAKRKYSTYDKEFYALVRSLEHWRHYLIAKEFILHSDHEALKYLQSQQKLQPRHAKWVETMQAFHFVIKHKSGKMNKGADALSRKYALLGSLKGRVISLEVLKEGYKDDPDFGELWEKCQIHAQGDYHIFDEFLFQKNRLCVPKHSVRETLIKEFHEGGLAGHFGIEKTTTL

SEQ ID NO: 29 - DNA, 4500 bp, Zea mays
tcctcgatccttgtccggtcgtccctctcgaactcgagcacgcagccggcagggaagagacaagcgccggagccagagaagcctgcggccaggccactaggccagggtactccggggaggcgagggagcgcttgagggcaacaggaaattgcattttcgttttgaccttgggcccctgctgtcccaccgccggtaatggcggcgaaggtgcggttcggcctactggtggcgatgttccaggccatgtcgggcgacaagagttcggcgaagaagcgcggccgcctgcgcgcgttcctcgaccgcgcctacgtgccctgtggcggtagggatgactacttcagcgcgctccgcctcgtgctgccggggctcgaccgtgagcgcggctcctacggtctcaaggaggcggccctcgccgccgtgcttgtggacgcccttggcatcgccaaggactctaccgacgccgtccggctcaccaactggcgccgcggtgggggtggccgcaacgccggcaacttttcgcttgtggccgctgagatcttgcaacggaggcaaggtataacttctggcggattgacgataaaggaggtcaatgatgcacttgatcgtctagctacaactgagaacaggtctgagaaggctttaatactttccaatctgatcaagaaaaccaatgcccttgaaatgaagtggcttctgatgataattcttaaagatttgaaattagggataagcgagaagagcatattcgaagaatttcatcctgatgcgcaagacttgttcaatgtcacttgtgacttgaaatttgtctgtgagaagctcaatgatcgaagccaaaggcataaacgccaggatatagaaattgggaaggctgtcaggcctcagctagctttgagagttcgtgattcttcagttgcttggaagaagcttcatggaaaacaagtagttgctgagtgcaaatttgatggtgaccgtattcaaatccacaaaaatggggaagagattcatttcttctctaggagctttcttgatcacactgaatacgcacctgggatgtcaaagattattaaagaaaatatcttggttgacagatgtatattggacggagaaatgcttgtctgggacactgtacttaaccgttttgctgaatttggctcaaaccaggaaatagctaaggctgcaagagagggattggagactgatcgacagttgtgttatgttgtttttgacatcctttatgctggagacaccagtgttatccaccaaagtttgacggagcggcatcaaattctgcagaaggttgtgaaacagttaaagggtcatcttgagattttgatcccaagacgtggtttaaatgtccctcgcccttcagatgaaccatgctggtcgattattgcacataatgctgaagacgttgataaattcttcaaagagactatcgagaacagagatgagggcattgtactgaaggaccttgattccaaatgggaacctggtgatcgaaatggaaagtggcttaaactaaagcctgattatatacacgcgggtgccgatctggatgttattattatagggggatactatggatcaggacgtcaaggtggagaggtcgcacagtttttagttggccttgcagtcccttcagatgataatagttatcccaaaaggttcctttcgttttgccgagttggtactggcctctctgatgaagagcgtgatgctcttgtcaccaaactgaacccttatttcaggaaaaatgagtaccccaaaaaaccaccaaaattctatgaagttacaaataactcaaaggagagaccagatgtttggattgaaagtcctgataagtcagtcataatatctgtaacaagtgacattcgtacaatcaagtctgaggtatttgctgctccatactgtttgaggttcccccgtattcagcgagtgagatatgacaagccatggcatgagtgccttgatgtgcaggcatttgtggacattgtgcattcaaataatggtacaatacaaagggtggcagatgataatagcctgaagaatgatgacacaaaacattcaagaacaaacaaaaaagtagagaagtgtgtctcaatcatcccttcacatttcatgaaaactgatgtatcaggtctcaagggagaaaccttgatatttgccaacctgattttctattttgtcaacattccatcatcatataatctcgaatattttcataaactggttgtggaaaatgggggatctttctccatgaatctcaatgactctgttacacactgcatagctgcggagaagaaaggtatcaaatatcaggcagctttacgacagggaagaatcattcactatgagtggatattagactgttgcaaggaaaaacatcttcttcatttgcatcctaggtatatactatttattgctgatttcgctaggcacaaatttcctgaagagatcgattcatacgctgactattactactgggacattgaaattgctgacctcaagcagattttctgtaacattgacaaagtttctggtgattcaaacatggttattcagtacaaaaagaagcattgcatagatgaaagattctgtttcttccagggttgctgtgtctacttgcataatgcgcccttagtgaatgcggactacaatgtaatatctgatcttgcactgaagagggtgaagcaggatctaacaatgcatggtggtcaagtctgcagcagtattgctccagctactcatttggtagtagtttcggttttacaggtctataactttgataacctgtacaagagcttccctcccgctgaaagacgttatctacatgacaaaagattacatgttgtcagtaacaagtggttggaagattcagtggagaaacaaatgaagctctctgaaactgcttacagccttaaaccagatacactagaagaactagaaattaaaaggagtgaggaaaatgttcagcctccggagcataagtttgaggaacacaaggaggttgaaagatctcatgcggaaaatatgccaaggaaaaggagtaggccaaccagttcaagaactgcaagggctgctcctagagcagtccgccgaataaggcctagaagaggaaaccagaaagcaaaaataggtgatgttgaatctgaagaaagtggccccagcgaatgccaagatgatgaaaatttggacacagatgatacctctaagattgaagaaggtattaccaacaaaaacaaaggactccctgcacctgcttcaaaaccagcctggagaacaggggctacaaaaggaaatcagcatacaaaaatagatgacagcggatctgaagaaagtgggccttgtgaaacagcgcaagatgattacatctctaagatggaagtagataacattgataatgaccgtggaccaccgccaggtgctcagcttttcacgttgggggagcaagaggtcaaaggtgtcaaattgaacaccgtggaggagaaacaagacagccctttccagagaacaaccgctgctgaagcgatgagtagcacgcctggtgagaagatagaacaaatggctgatccgttgcacgccatgcttctggatatgttgccactcctgggccagaaaaggacagaagatacaagcaaggcgcccttggcgaaagctgagaaggatccacctgcgataggaagctccacatccaattctgagattctgttgccagatgctggaacatccggggttccagccccagagccaagtgcagctccaccaaagaagaaaaaagtgagttacagagatgtcgttagtgaacttctgaaagattggtgagcgagcttggtcagtggggatagcctgcagtctatgttttactcccgtaatcgctatctttgtaaataggacagcgccatctaagtaaccatgtttgtagggtcaccttggctgcttgtcgtgccctgccctctggagctcacttgttttgcctgttgagaattttgactgttaagcctaacaacactgacgttgagttggaccaatatgcacgcggaatgctaggattctacaaagtggaagtggaagcctgttgtccgctctctgcaattggttttggatctttgcactgcagccaatgttgtcgctttcgctgtatacgagaatgtggtctgagccgaagccgagaaagaggaagctctccgtttggcggcctcggcgtgtggtcgtcgtgcgctgtgccgtgccgggccgagtcggtttaccaccaaactggcgtgtgtctgaaacgaaaaggaggggaatggagtcatggagatttgtcgccgaatcgccgttatttcacgcttgtcggaccattcactgttgctcgatcgagtctcgactctcgactgtgcaagtcgttggattggacatttggaccacagcagagtctgtagaggtagtagcagtattcaccaacgtactgactggattattctctctcttttaaaagaaaccctgactggatttttcttc

SEQ ID NO: 30 - protein, 1208 aa, Zea mays
MAAKVRFGLLVAMFQAMSGDKSSAKKRGRLRAFLDRAYVPCGGRDDYFSALRLVLPGLDRERGSYGLKEAALAAVLVDALGIAKDSTDAVRLTNWRRGGGGRNAGNFSLVAAEILQRRQGITSGGLTIKEVNDALDRLATTENRSEKALILSNLIKKTNALEMKWLLMIILKDLKLGISEKSIFEEFHPDAQDLFNVTCDLKFVCEKLNDRSQRHKRQDIEIGKAVRPQLALRVRDSSVAWKKLHGKQVVAECKFDGDRIQIHKNGEEIHFFSRSFLDHTEYAPGMSKIIKENILVDRCILDGEMLVWDTVLNRFAEFGSNQEIAKAAREGLETDRQLCYVVFDILYAGDTSVIHQSLTERHQILQKVVKQLKGHLEILIPRRGLNVPRPSDEPCWSIIAHNAEDVDKFFKETIENRDEGIVLKDLDSKWEPGDRNGKWLKLKPDYIHAGADLDVIIIGGYYGSGRQGGEVAQFLVGLAVPSDDNSYPKRFLSFCRVGTGLSDEERDALVTKLNPYFRKNEYPKKPPKFYEVTNNSKERPDVWIESPDKSVIISVTSDIRTIKSEVFAAPYCLRFPRIQRVRYDKPWHECLDVQAFVDIVHSNNGTIQRVADDNSLKNDDTKHSRTNKKVEKCVSIIPSHFMKTDVSGLKGETLIFANLIFYFVNIPSSYNLEYFHKLVVENGGSFSMNLNDSVTHCIAAEKKGIKYQAALRQGRIIHYEWILDCCKEKHLLHLHPRYILFIADFARHKFPEEIDSYADYYYWDIEIADLKQIFCNIDKVSGDSNMVIQYKKKHCIDERFCFFQGCCVYLHNAPLVNADYNVISDLALKRVKQDLTMHGGQVCSSIAPATHLVVVSVLQVYNFDNLYKSFPPAERRYLHDKRLHVVSNKWLEDSVEKQMKLSETAYSLKPDTLEELEIKRSEENVQPPEHKFEEHKEVERSHAENMPRKRSRPTSSRTARAAPRAVRRIRPRRGNQKAKIGDVESEESGPSECQDDENLDTDDTSKIEEGITNKNKGLPAPASKPAWRTGATKGNQHTKIDDSGSEESGPCETAQDDYISKMEVDNIDNDRGPPPGAQLFTLGEQEVKGVKLNTVEEKQDSPFQRTTAAEAMSSTPGEKIEQMADPLHAMLLDMLPLLGQKRTEDTSKAPLAKAEKDPPAIGSSTSNSEILLPDAGTSGVPAPEPSAAPPKKKKVSYRDVVSELLKDW

SEQ ID NO: 31 - DNA, 4101 bp, Brassica napus
tcagtcaacaaagtttcagggcaaatgtgtgtagttcccaataaaagaaaatttctccctgggagagagagagagagaaggaacaatcgctgtcgatgaaactaaaaagttcgttcctttgccggccgtgcgacttttaaaacacgactttcttctccgacaagctattcgcgacgccgcctactgtctctccgacagtaatcaaaccctctccgaccaaaaactcaccaaaggaatcactaattcccgtaaaaaaagaagatgacggaggagatcaaattaagcgtactagtgtctctgttcaactggattcagaagagcaaaacctcatcccagaaacgctccaagttccgcaagttcctcgacacctactgcaaaccctccgattacttcgccgccgtccgtctcatcatcccgtcgctcgaccgagagcgaggcagctacggtctcaaggagtctgtgctcgccacgtgtctcatcgacgccctcggaatctctcgcgatgctcccgacgcggttcgccttctcaattggcgcaaaggaggaaccgctaaggctggagccaacgccggaaacttctctttgattgctgctgaggtactgcaacgtaggcaagggatggcgtcgggtgggttgagtgttaaggagttgaatgatttgcttgatcgtttggcttcgagtgagaacagaggggagaagacttctgttctttctacgctgattcagaagacgaatgcacaggagatgaagtgggtcattaggatcattcttaaagatttgaagctggggatgagcgagaggagcatatttcaggagttccatccagatgctgaggacttgtttaatgtcacttgtgacttgaaactagtctgtgaaaagctcagggatcgccaccaacgtcacaagcgccaggatatagaagttggaaaagctgtacgaccccagttagctatgcgtatcagtgacgtgaatgctgcttggaagaagctccacgggaaagatgtagttgctgagtgcaaatttgatggggatcgcattcagatacacaaaaatgggactgagatacattacttctctaggaacttccttgaccattctgaatatgcacatgccatgtcggatcttatcgtacaaaatataatggctgacaggtgtatccttgatggtgaaatgttggtttgggatacatctcttaatcggtttgctgaatttggttcgaatcaggaaatagtcaaagcagcaagggagggtctcgacagccatagacagttatgttatgttgcctttgatgttctttatgttggcgatactagtgtcatccaccagagtttaacagaacggcacggactcctgaggaaagtggtgaagccgttaaaaggccggcttgaagttttagtgcctgaaggtggtctcaatgttcatcgcccttcaggggaaccaagttggtctattgtggttcattctgcagctgatgttgagcggtttttcaaagaaacagttgaaaatagggatgaaggagttgtgcttaaagacctgggatcgaaatgggaacctggagatcgcagtggcaagtggttgaagttgaagcctgaatatgtccgggctggttctgatctagatgttcttataataggaggatactatggctctggccgtcacggaggagaggtagcacagtttctcgttgggttggctgaccgggcagagacaaatgtgtatcccaggcgatttatgtcgttttgtagagttggcacaggactttctgatgaagagcttaacactgttgtaagcaaactgaagccttatttcagaaaaaatgaacacccaaagaaggccccaccaagcttttatcaggtcacaaatcactcaaaagagagacctgatgtttggattgaaagcccggaaaaatcaataatactctccatcactagtgacatcaggacaataaggtctgaggtttttgtcgcaccttacagcctgaggtttcctcgtattgataaagtaagatacgacaaaccttggcatgaatgtctcgatgtgcaagcttttgtggaattggtgaactcaagtaacggcaccacacagaaacagaaggaatccgaaagcatgcaggacaatccgaaagtcattaaatcgtccaagagaggaggagagaaaaagaatgcgtcacttgtcccatctcagtttattcaaactgatgtatcggatatcaagggcaagacctcaatcttctccaatatgatattttattttgtaaacctgcctcggtcccattctcttgatacattccacaaaatggtggttgagaatggagggaagttctcgatgaacttaaacaattcagtgactcattgcattgcagcggaaagcagtggaataaagtatcaggcagcaaaacgtcaaagagatgtcatccacttttcatgggtcttagattgttgttcacggaatattctgcttcctttgcagccaaagtacttcctccatctcactgatgcttcaaggaccaaattacaggatgaaattgacgagttttccgattcttatttctttgatttagaccttgaaggtctcaaacaggtcttgagcaatgccaagcaatcggaagactcaaaatccattgaatactacaagaaaaagctatgtccggagaaaagatggtcctgcttcatcggttgctgcatttactttcacctctattgtgaaacattgagtattgaagaggaagctctgttgggaatcatggctaagagattagcgcttgaagtcttaatgggtggtggtaaagttagccataatctttctcatgcctcgcaccttgtagtcctttctacagcagaagagactttggattttacttcagtttcaaaaagtttcagcgaaaaggagaaacgtcttttgctgaagagaaggctacatgttgttaactcgaactggttagaggacagtttgcaaagagagcaaaaactaagcgaggatgtgtacactctgaggcctaagagtatggaagagtcggatactgaagaatcagataaatctgaacatgatacaacggaagtagcttccggtgttagtgctcaaaccgaagagccagcttcctcgaaaatggcagttacgagttcaagaggacggtcgagtactcgagctggtaataaaaggggaaggtcttctacaaactcagtgaaacgagtacagagacgcagagggaaacagccttctaagataggcggaagtgaaacagaggagagtgatacggcttcggaagagaaggcttcaacaagactcagtgatgatatagcagaagagactggtgatactcaaagaaactctaggagaggaagatctgcaaagagaggaaagtctcgtgtggcacaaccccaaagagtacagagatcaagaagaggcaacaagcctttgaagataggaggagatgagtctgaggaaaatgatgattttgatgacaagaaaaatgattccgcggaggaggaaaacaaggaagaaacaggagagcctgacaaagcaaagcaaagagataacacagtaacagttgaagaggcctcctcaaaagattctagaaatgcaaagaccgagatagatagggaagagaagatacaaatccatgaggatccattacaagcaatgttgatgaacatgatcccaagcctcagtctgagaaacacaagccgaactacgggcgacgctagtacggctaatgtttgtggtgagagtgagtcttcagagagaagaaaacttggcgccgagactgataatacgtgtgtgatgaacgcagaggcaggtgaagttcctcctcctgtgaagaaaaagaaagttagctaccgcgatgttgcaggagaactgctcaaagactggtgaaacagctgccgttacagaccaagtacacgaagctcctatttcatgtgtgttatgtatatacaatatatgtttttctgtgaccattattattactcttttcgtttcattcacatataatttcaaccattttgtttgtcttttaactcgctctccctttttttgaatctaccatgttttactagaaaattgatattcttttgctacttaatcaaaacttctgttgaaatt

SEQ ID NO: 32 - protein, 1203 aa, Brassica napus
MTEEIKLSVLVSLFNWIQKSKTSSQKRSKFRKFLDTYCKPSDYFAAVRLIIPSLDRERGSYGLKESVLATCLIDALGISRDAPDAVRLLNWRKGGTAKAGANAGNFSLIAAEVLQRRQGMASGGLSVKELNDLLDRLASSENRGEKTSVLSTLIQKTNAQEMKWVIRIILKDLKLGMSERSIFQEFHPDAEDLFNVTCDLKLVCEKLRDRHQRHKRQDIEVGKAVRPQLAMRISDVNAAWKKLHGKDVVAECKFDGDRIQIHKNGTEIHYFSRNFLDHSEYAHAMSDLIVQNIMADRCILDGEMLVWDTSLNRFAEFGSNQEIVKAAREGLDSHRQLCYVAFDVLYVGDTSVIHQSLTERHGLLRKVVKPLKGRLEVLVPEGGLNVHRPSGEPSWSIVVHSAADVERFFKETVENRDEGVVLKDLGSKWEPGDRSGKWLKLKPEYVRAGSDLDVLIIGGYYGSGRHGGEVAQFLVGLADRAETNVYPRRFMSFCRVGTGLSDEELNTVVSKLKPYFRKNEHPKKAPPSFYQVTNHSKERPDVWIESPEKSIILSITSDIRTIRSEVFVAPYSLRFPRIDKVRYDKPWHECLDVQAFVELVNSSNGTTQKQKESESMQDNPKVIKSSKRGGEKKNASLVPSQFIQTDVSDIKGKTSIFSNMIFYFVNLPRSHSLDTFHKMVVENGGKFSMNLNNSVTHCIAAESSGIKYQAAKRQRDVIHFSWVLDCCSRNILLPLQPKYFLHLTDASRTKLQDEIDEFSDSYFFDLDLEGLKQVLSNAKQSEDSKSIEYYKKKLCPEKRWSCFIGCCIYFHLYCETLSIEEEALLGIMAKRLALEVLMGGGKVSHNLSHASHLVVLSTAEETLDFTSVSKSFSEKEKRLLLKRRLHVVNSNWLEDSLQREQKLSEDVYTLRPKSMEESDTEESDKSEHDTTEVASGVSAQTEEPASSKMAVTSSRGRSSTRAGNKRGRSSTNSVKRVQRRRGKQPSKIGGSETEESDTASEEKASTRLSDDIAEETGDTQRNSRRGRSAKRGKSRVAQPQRVQRSRRGNKPLKIGGDESEENDDFDDKKNDSAEEENKEETGEPDKAKQRDNTVTVEEASSKDSRNAKTEIDREEKIQIHEDPLQAMLMNMIPSLSLRNTSRTTGDASTANVCGESESSERRKLGAETDNTCVMNAEAGEVPPPVKKKKVSYRDVAGELLKDW

SEQ ID NO: 33 - DNA, 3640 bp, Helianthus annuus
aattcaaaaaacaccacacacaaacacacattccacacacacacaaaaccctcaccgatcaaaaatgtcaggggagacgaaattcagcgtgatgtgcagcctattcaactggatccagaaatcaaaatcttcaaagcaaaagcgatcaaagttccggaagtttctggacacctactgtaaaccctcggattacttcgccgctgtcagactgatcctcccgaacctcgacagagaacgaggatcctacggcttgaaggagtccgtgctcgccacttgcattatcgatgctctcggtatgtccagagagtctgcggatgctgttcgactcattaattggcgtaaaggcggggcgaaaaccggtgttaatgttggcaatttctcacttgttgcttctgaggttttacagaggaggcagggcatgatgtctggtggactaacaattaaagagctaaatgacttgcttgatcgattagcatctaatgaaaatagagcagagaagacttctgttctttctgatctgatcaagaaaacaaacgcacaagaaatgaagtggatcgttatgattatcctcaaagatctcaagttgggaattagtgaaaaaagcatcttccatgaatttcacccggacgctgaggacttgttcaatgtcacatgtgacctaaaactagtttgtgaaaggttgagggacccacatcaacggcacaagcgtcaggatatagaggttggaaaagctgtacgccctcagctggctttgagggttgctaatgcagctagtgcatggaaaaagcttcatgggaaggaagttgtcatggagtgcaaattcgatggtgatcgcatccaaattcataagaatggccaagagatacacttcttttcaaggaattttattgatcactcagaatatactcacgggatgtcaaatgtaattatggaaaatgttcttgttgacaggtgtatacttgatggtgaaatgttagtttgggacacatcaactgaccgctttgctgaatttggttcaaatcaagaaatagccaaggcagcaaaggagggacttgctagtgagcgacagttatgctatgttgcatttgatattctatatgttggagacactagtgttatccatcaaagtttaaaggaaagacatgagctactaaaaaaggttgtgaagccagtcaaaggtcgtcttgagatcttggttcctgatgggggtcttaatgctcatacaactgccggggaaccgtgttggtcacgtgttgctcgtaatgtggatgacgttgatacatttttcaagcgaaccattgagaacagagatgaaggaattgttttgaaagacctcgagtctaaatgggaacctagtgatcggagtggcaagtggttaaagttgaaacctgactatgttagagctggatctgatttggatgttctcattatagggggatattatggatctggtcgccgtggtggacaggttgctcaatttttggtgggcctagcagagcgcccagccccaaatacatatcctaggcggttcgtttccttttgcagagtgggtactgggctctccgatgaggagcttgatgctgttgtaaataaattaaagccttatttcaggaaatacgaatacccgaagaagggtcctcctagctattataaggtcacaaatagctccaaagagaggccagatgtctggatcgacagtcccgagaaatcaataatactttctatcaccagtgacatccgtacaatccggtctgaggtttttgctgctccatacagcttgagatttcctcgtatagacaaagtgagagatgataaaccttggcacgaatgccttgatgtggaatcttttgtagaattggtgcattctagtaaccacacaacacaatggggagaaactcaacatgaaaataaatcaaaaagatcaaaatcatcaaggaccgcagataagaagagtggctctttggttccttttcatcttcttcagactgatgtttctcatattaagggagaaaccaaaatattctcgaatatgatgttttactttgcaaatgtaccttccacacattccttggattcattgcacaaaatggtggctgaaaacggtggtactttttcaatgaatttgaataatgcggttactcactgtattgcggcagaaagtagagggatcaagtttcaagctgcaaaacgtcatggtgacgttatccattactcatggctgattgattgttgttcacagaagaaacttgttccgttacaaccaaagtatttccttgtgctttccgagtcatcaaagaagaaattacaggaagagattgatgaatattcagattcttactttctggatattgatatcaaagatttggaacagcttttggctaacataaataggtctgaggaatctaaaaccattgactattataaaaagaaatactgtcctctggataaatggtcacgtttcagcgggtgctgcatgtacttctacatcccagcaaactgtccgagtttggattgggaagctttacttcaagttaccatgaagaggatgaagcttgaggtttgctttaatggtggcaaggtcaccaactgtatatctaatgctactcatttcgtagtcatgtctttgccaggatttaatgtggactttaatactatactaaaaagtttctcaccctctgagaggcgctttataaggaacacgagtttacatctggtcaactgtcagtggctagaagactgttttgagaaggaccagatactgcaggaagaagaatacagtttgaggccctctgatttatccgaatcaactttatctgacgagcatgcacttgagacggaaacattgactagcttgaaggaagaagataaaaacgagaagaaaaaaacagtaaatgtagaagtaccatctttggataatgatggcagaaagagaaaagggagacagcctaaagcgagagtaaatactagacggaaaacgggtcccacccagcctcgaagaacgagggcaagatctggaaacaaggctgtgaaaatacatgaatatgtatcggacgaagatgaggaggcttctgcagatgaaagttatgtgaaacttgatgacgaagaaaagcatcacgaattaatgcaagatgataccattgtagaagatacagagccattagaaaaaggcattaatgatacgcagataacaacagaatatgttgacaatagggatggtgatggtgatgatgataagaataattataataacagagagagtgataaactggagatcatggttgacccggttcaggccatgttgctagacatgatccccagtttggaacccaggaataaggaaacacccgtctctgacccgcctgctacgaagatggaaacccctagtttagaccctaatccgaatcatggtcctgatcctggtccagggccttcaaagaagaagaaagtcagttacagggatttggctatggattggctcaaggactaatactgtagttcaatcacttgtgtttttctgtcactatgtaatctgtaaattgtaaaagcatttgtagttttaaatttatcttcacgtaatctttaatttcgctggatcgtgattttgtgttttgtacatataataataattgtgtgtggtaat

SEQ ID NO: 34 - protein, 1140 aa, Helianthus annuus
MSGETKFSVMCSLFNWIQKSKSSKQKRSKFRKFLDTYCKPSDYFAAVRLILPNLDRERGSYGLKESVLATCIIDALGMSRESADAVRLINWRKGGAKTGVNVGNFSLVASEVLQRRQGMMSGGLTIKELNDLLDRLASNENRAEKTSVLSDLIKKTNAQEMKWIVMIILKDLKLGISEKSIFHEFHPDAEDLFNVTCDLKLVCERLRDPHQRHKRQDIEVGKAVRPQLALRVANAASAWKKLHGKEVVMECKFDGDRIQIHKNGQEIHFFSRNFIDHSEYTHGMSNVIMENVLVDRCILDGEMLVWDTSTDRFAEFGSNQEIAKAAKEGLASERQLCYVAFDILYVGDTSVIHQSLKERHELLKKVVKPVKGRLEILVPDGGLNAHTTAGEPCWSRVARNVDDVDTFFKRTIENRDEGIVLKDLESKWEPSDRSGKWLKLKPDYVRAGSDLDVLIIGGYYGSGRRGGQVAQFLVGLAERPAPNTYPRRFVSFCRVGTGLSDEELDAVVNKLKPYFRKYEYPKKGPPSYYKVTNSSKERPDVWIDSPEKSIILSITSDIRTIRSEVFAAPYSLRFPRIDKVRDDKPWHECLDVESFVELVHSSNHTTQWGETQHENKSKRSKSSRTADKKSGSLVPFHLLQTDVSHIKGETKIFSNMMFYFANVPSTHSLDSLHKMVAENGGTFSMNLNNAVTHCIAAESRGIKFQAAKRHGDVIHYSWLIDCCSQKKLVPLQPKYFLVLSESSKKKLQEEIDEYSDSYFLDIDIKDLEQLLANINRSEESKTIDYYKKKYCPLDKWSRFSGCCMYFYIPANCPSLDWEALLQVTMKRMKLEVCFNGGKVTNCISNATHFVVMSLPGFNVDFNTILKSFSPSERRFIRNTSLHLVNCQWLEDCFEKDQILQEEEYSLRPSDLSESTLSDEHALETETLTSLKEEDKNEKKKTVNVEVPSLDNDGRKRKGRQPKARVNTRRKTGPTQPRRTRARSGNKAVKIHEYVSDEDEEASADESYVKLDDEEKHHELMQDDTIVEDTEPLEKGINDTQITTEYVDNRDGDGDDDKNNYNNRESDKLEIMVDPVQAMLLDMIPSLEPRNKETPVSDPPATKMETPSLDPNPNHGPDPGPGPSKKKKVSYRDLAMDWLKD

SEQ ID NO: 35 - DNA, 2496 bp, Hordeum vulgare
gggccgcagcgccgcgctatggctaagcaaagccgcgccaaggacggcgacgagatccgcctccttgagacctggatcgacgcaggcaagcccctcccgggaaccaagccgcctcccccctctgaggactcctccgccgccaacgcacggggaagggcacgagttgtagtggctaaggcggcggccggggagtactcggattatggcgcgtccacgcgattcgatgagctaccgctgtcgacgaagaccaaggacgccctgcggcagcaggggtacaaggagatgagcgagatccagcgggccgccctgccccacgcgttatgcgggcgcgatgtcctcggcgcggccaagaccgggtccggcaagaccctcgccttcgtcatcccagtcattgagaagctgtatcgggagaaatggagtcaagaggatggtgtgggttgcattattctctctcccactaatgatttagctggtcaaatttgggaagtggtcaggaaggtcgggaagcaccataactttagtggtggtgctatcgttaagcgcacgggtatcgagcaagaaaaggaacgcataaacagtttgaatatcttagtgtgcactcctggacggttagtccagcactttgatgagactccgaactttgattgctcaaatctccagatattggtgcttgatgaggcggatcaaatacttgatcaaaatttcaaatcccaagttgacattatcatttctcaaatacctaaagttagacaaaccttactgttttctgccacacagacaaagtcagttaaggaccttgcaagggttagcctaaagaatcctgaatacattagtgtgcatgagcaggctatcacggctaccccagataaccttgaacagtgtgccatgattgtgcctcttgaacagaaactgaatatgctttggagtttcatcaaaaggcatctaaagtcaaaaatactagtcttcttatcaagtgttaagcaggtcaaatttgtgtatgaaattttcaagaaactgcgtcctggcattcctctaaaatgtatgcatgggcggatgaaatatgaagtacagcaggccatagtagcagaattcagcgaaagtacttcggttctgttctcaactgatatatttgctagaggactagatatagggaatgtggattgggtggtacaggttgattgtccagaaagcgtcgcactgtacatccacagagttggtcgcacagctcgttacaacaagaaagggaaatctcttatattcttgtgtccagaggaagaaagaatgctggaaaaattgaaggcaaccgagagtaaaatacctataaatgttcgaaagccaaaagtggaacaactggagcagatatctcagaatgtagcagcagtgcttgttaaattccccaatctacagcaactaggtaaacgggcttttgtgacctatctcaagtcagtgtacctccagggggacaaagaggtgtttgatttgagcaggttctctgcggagagttttgctgcatacgcctcttcgcttggtcttcctgttacccctaaaatccgcttcgtaagccacaagaagaatgtgtcgaagaaagatatggaggacattggtgtgaaacagatgaaacacaaagctgaagttattgaaataaaaccacaggtcaagcgtgatatgctcgcagatgatggacccgatgatgatatcctttatccgaagaagcccaacccagatgcaaatatttatggtggactagatgagatcctttctcccaaagtgcctggcgctgatacacatatggaagcagaaaaaatcgaagagctggtagcgaggcccttgaaaaagaagaagctgaagataaacatgcacaggcctgtgggaacaagggtcaagtatgatgatgagggcaatgcgattgatcctcttgcgtctttagccgaagaagtgggcccagaagacgtgattcacaaggataaaattctgcagaggtatgcagagatgctgagagaaatgcaggaggatgacaaggaggacaaggcccagcacaagaagagtttgcaggagaagaagtttgagaagaagatgaaactgaagcgcaggcgacaggaggaaaccgatgcggtgtctgacgacagcggctcagagtctgacagaaacacgaacacgtcctccaagggtaaaaagaagtacttcaacaacagcgacgatgatgaaggtggccatgcagcaaagggtggggacctcctcgcacagcaggaggcactggcactgaagcttctcggtaaaatgcaccactaaactcctgtgtctgatggtgttttgtgttggtgcagcaatgctgtgtatgtaccgcgtgattggcggttataggttagtgaactctccacaatggagacggaattttgatgcggcactgtatggtttcctgggagttgatatatactacgtactatacaattgaagagacaattacttatttggccataaaaagttattttcttacct

SEQ ID NO: 36 - protein, 756 aa, Hordeum vulgare
MAKQSRAKDGDEIRLLETWIDAGKPLPGTKPPPPSEDSSAANARGRARVVVAKAAAGEYSDYGASTRFDELPLSTKTKDALRQQGYKEMSEIQRAALPHALCGRDVLGAAKTGSGKTLAFVIPVIEKLYREKWSQEDGVGCIILSPTNDLAGQIWEVVRKVGKHHNFSGGAIVKRTGIEQEKERINSLNILVCTPGRLVQHFDETPNFDCSNLQILVLDEADQILDQNFKSQVDIIISQIPKVRQTLLFSATQTKSVKDLARVSLKNPEYISVHEQAITATPDNLEQCAMIVPLEQKLNMLWSFIKRHLKSKILVFLSSVKQVKFVYEIFKKLRPGIPLKCMHGRMKYEVQQAIVAEFSESTSVLFSTDIFARGLDIGNVDWVVQVDCPESVALYIHRVGRTARYNKKGKSLIFLCPEEERMLEKLKATESKIPINVRKPKVEQLEQISQNVAAVLVKFPNLQQLGKRAFVTYLKSVYLQGDKEVFDLSRFSAESFAAYASSLGLPVTPKIRFVSHKKNVSKKDMEDIGVKQMKHKAEVIEIKPQVKRDMLADDGPDDDILYPKKPNPDANIYGGLDEILSPKVPGADTHMEAEKIEELVARPLKKKKLKINMHRPVGTRVKYDDEGNAIDPLASLAEEVGPEDVIHKDKILQRYAEMLREMQEDDKEDKAQHKKSLQEKKFEKKMKLKRRRQEETDAVSDDSGSESDRNTNTSSKGKKKYFNNSDDDEGGHAAKGGDLLAQQEALALKLLGKMHH

SEQ ID NO: 37 - DNA, 2936 bp, Triticum aestivum
gatgaaccgcccacccccccatcaatcccacctcacaaaccgcgccctcctctcctcccgtacaccgccgccgcttcccccacaaccaccaccgcgcaccaccaacggcaaaaccctcccccaaattcgaacctcccctcccctcccctctcctccgccgattcgatggaggcgccgccgccgctgacggcgggcgcggtgacggagatatgggagctcccgaacgggccggcgacgttccagccggtgctgcaggtcgcggaccttcgccccgtcgtcgccaagaacacgaccgcggcggcggccgcggcgcagcactcggagcggttccgcatgctgctctccgacggcgtccactcccagcagtccatgctcggcaccggcctcaacgacctcataaaggacggaaccctccgcgtcggctccatcgtccacctcacggacatgacgtgcaacaccatccagaaacgcaggatcgttattgttgtcaaacttgaagttctccaaagtgagtgccccaaaattgggacaccaaagatttatgagaaaagcttacctgaggaacaggagcctaacttaccggccaatcctgctcaaacaaacagtggaaactattctggcccaggcatgctggggtctgcagttgctccaagggtggaacagattggtaacaatctgtcatatggtagacccaacaacggtggcccaggtgtggactcttcaatttgtcagtctgttcaacctggtgctaacaatgtgttgtctggtggaacttatggtgcaatgtcagcacataacacaatgaatgccaacgtggtgcacccaaactctcatcaaaaccaaagttttgcggttcctggcacaggtgggggctttggccctcctggcaatatatatgggcgccctgcacagccttcatatcagcagccacctccaccccatagaaatagtggcccagttgctaagaatgaagctgcttctcgtgttattccaatttctgcactgaacccataccaacgtacatggacaataaaggctagggtgactgcgaaggttcatgtcaagaacttcaataacgcaagaggtccaggaaaagtcttctcctttgatctccttgatgcaaatggtggagaaattcgtgcaacatgctttggcgtggcagttgatcagttctatgacttaattgaggttgataaggtgtacttggtatctaggggatcgctaaaacccgcaaacaagaggtttagccctttaaacaatgactatgaaataaaccttgagccttcatcatctatagaagtttgttctggtgatgatagcagcatccctaagcagcagttcaattttcggcagatcagcgaaattgcaaacatggataaagataccacggtagacttgcttggtgttgttacttcagttaggccttcttttacagtaatgcttaagaatggcggggaaacccagaaaagagtccttcaactgaaggacatgtctggttgcagtgtggaaatgaccttttggggtaacttctgtgatgctgaaggtcagcagctgcagtcgctgtgcgattctggtttgaatcctatacttgcgctgaaatctggccgagttggtgaattcaatggcaaaacagtgagtacaactagctcaagtttgttaaaaataaatccagatttccctgaagctgaaaggctgaggcagtggtacataactgaaggaaaaattgctgcctgcacttctttatctggggaaatgtcaagcatgggcaggactgatgtccggaaaaaaactgcacagatcaaggatgaacgcctggggcaatcagaaaagcctgattggatcaccgttcaaggtgcaatttcacaaatctacactgataatttttgttacccagcatgcaccagggaggttaatggtaaaagctgcaacaaaaaggtcacaaataatggtgatgggatgtggctttgtgagaaatgcgatcagagctctgaaacgtgcgagtatagatacctgctgtcgtgccatatccaggatcatactgggttcactcatgcaacttcgttccaagaggctggccaggagataatcggcctctcagcacaagatcttttcaggataaagcatgaagagcaagacgatgtacggtttgcagaaatcatacagcaggtccgttttcagcaatacctattcaagctgagagtcaaggaagaagtctataatgatgagccgcgtgtgaagtgcaacattgttaaggctgaaagatacgacccagtgaaagagagtcgtttttttctgggggccattgatagccttttggcggaggacacttcaggctcttcccctgggctgaatggtggtcctgctgttaatgctggcttcgccaactcagaagctggacagagtgtgccagcctccaacaattcctatgccgtgaatatgggtggcccaaatcagtttgggcagcaattcagcgcatcgatcgggatgccggctgcaccatcagcgacaccagcagcaggtagcggcttcgcacctaattcctatggtccttcagctgccaatgccagctcaggcttgtgcttcaaatgtaaccagcccgggcacttttcaagagactgtccagggcaggctgccccctacagttcttcggctggcggcaacgccaacactggtctgtgcttcaaatgtaatcagcctgggcacttcgcaagagactgtccagcgcaggctgctggccaccagcgccagacgtatgcgaatggcgccgcggcaggaggatacaacaggcaatcctatgttggtagctaagtagtttggccgatcacttgttttctgttctctactttggtactgcttgtagttttcatgtacctgcactacttggtcttgattgtcaatagatgttgactggacaaaaaaaaaaaaaaaacgaggcc

SEQ ID NO: 38 - protein, 880 aa, Triticum aestivum
MEAPPPLTAGAVTEIWELPNGPATFQPVLQVADLRPVVAKNTTAAAAAAQHSERFRMLLSDGVHSQQSMLGTGLNDLIKDGTLRVGSIVHLTDMTCNTIQKRRIVIVVKLEVLQSECPKIGTPKIYEKSLPEEQEPNLPANPAQTNSGNYSGPGMLGSAVAPRVEQIGNNLSYGRPNNGGPGVDSSICQSVQPGANNVLSGGTYGAMSAHNTMNANVVHPNSHQNQSFAVPGTGGGFGPPGNIYGRPAQPSYQQPPPPHRNSGPVAKNEAASRVIPISALNPYQRTWTIKARVTAKVHVKNFNNARGPGKVFSFDLLDANGGEIRATCFGVAVDQFYDLIEVDKVYLVSRGSLKPANKRFSPLNNDYEINLEPSSSIEVCSGDDSSIPKQQFNFRQISEIANMDKDTTVDLLGVVTSVRPSFTVMLKNGGETQKRVLQLKDMSGCSVEMTFWGNFCDAEGQQLQSLCDSGLNPILALKSGRVGEFNGKTVSTTSSSLLKINPDFPEAERLRQWYITEGKIAACTSLSGEMSSMGRTDVRKKTAQIKDERLGQSEKPDWITVQGAISQIYTDNFCYPACTREVNGKSCNKKVTNNGDGMWLCEKCDQSSETCEYRYLLSCHIQDHTGFTHATSFQEAGQEIIGLSAQDLFRIKHEEQDDVRFAEIIQQVRFQQYLFKLRVKEEVYNDEPRVKCNIVKAERYDPVKESRFFLGAIDSLLAEDTSGSSPGLNGGPAVNAGFANSEAGQSVPASNNSYAVNMGGPNQFGQQFSASIGMPAAPSATPAAGSGFAPNSYGPSAANASSGLCFKCNQPGHFSRDCPGQAAPYSSSAGGNANTGLCFKCNQPGHFARDCPAQAAGHQRQTYANGAAAGGYNRQSYVGS

SEQ ID NO: 39 - DNA, 2913 bp, Secale cereale
atgctgctctccgacggcctccactcccagcagtccatgctcgccaccacccacaaccacctcgtcaagtccggcgccctccgcgtcggcgccatcgtccaaatccacgacatcacctgcaacaccatccagaaccgcaggatcattattattgtcaaacttgaggttctgcaaagtgagtgtgacctgatcgggaagccaaggatttatgagaagagcttacctgcgggacaggtgcctaacttaccggccagtgctgctcaagcaaataacggaaactattccaatggtccaggcatgcttggcaatggtgtagcaccaaaggtggagcagagtactcacaatcagtcgtatggtggaccctacaatggtgttcacagcccagcaaacccttctagtggacctaacaatgtgtcgcctggtgggtcttatggtacaatgtcagcacagaacacaatgaatggcaatatggtgcagccaaactctcagcggccttacaatggtgttcacagcccagtggacccctctattggtcggacagtccaacctggacctaacaatgtgccgcctggtggatcttatggtacaatgtcagcgcagaacacaatgaatggcaatatggtgcagccaaactcccagcggcctttactgaactctcatcagaaccaaaggtttgcagttcctggcgcaggtgggggcataagcccccccggcaatgtttacgggcgtcctgctcagccttcgtatcagcagccgcctgcagcgtatacaaatagtggcccagctgctaagaatggagctgcccttcgcaccgtcccgatttctgcactgaacccttaccaacgtacatggacaataaaggctagggtggctgccaagagtcaggtcaagcactacaacaatgcaagaggtccaggcaagctcttcaactttgatctccgtgatgcacatggtggagaaattcgtgcagtatgctttaatacacagttggatcagttctatgacctgattgaggttgataaagtgtacttgatatctagagggtcgctgaagcccgcaaataaacagtttaaccatttgaacaatgactacgaagtcactctggattctgcaacaaccatagaagtttgttctgatgatgatagcagcatccccaggcagcagtttgatttccggcagatcagcgaaatagcaaacatggataaagacaccatggtggatttgcttggggttgttacgtcagttagcccttcttctccatttacacggaaggatggtgcggaaacccagaaacaagtccttcaactgagggacatgtctggttgcagcgtggaaataaccttttggggtggcttctgtaatgctgaaggtcagcagctgcagtcgctgtgtgattctggttcaaatcctgtgcttgccctgagatctgtccgtgttggtgaatttaagggcagaaatgtaagcacaattggctcaagcttcttaaagataaatccagacttccctgctgccaaaagtctgaggcagtggtacataactgaagggaaaaacgctgctttcacttctttatctatgggagggtcaggcatgggccggactgatgaccgaaaaactgttgagcagatcaaggctgaaaacttggggagatcagagaagcctgattggatcactgttaagggtgcgatttcccacatcagcaccgacaacttctgttacccagcttgcaccacggaggttaatggtacgcgctgcaacaaaaaggtgacgaataatggcgatggtatgtggcagtgtgacaaatgtgaccagagcactccaaattgcgagtataggtacatgctccagtgtcaaatccaggattataccgggacgagctatgcaactgcattccatgacgccggcaaggatataatcggcctcccagcacaagatctgtacaggataaagcatgaagaacaagaagatgagaaattcgcagacatcatacagaaggtccgttttgagctattccttttcaagctgaaagtcaaggaagaagtgtttaatgatgaacctcgggtgaaatgctacattgttaatgctcagagattggaggacacgtcgaaagagtctcgctttctactgggcccaattgatacccttttggcggaagatggcttaggtccaacccctgtggtgaatggtgctgctgctgtcaacactggtttcacctccaacagcactggtacctacagcacgaatatcagcggcccaaatcagtttgggcagcgaacgagctcatctagcatggtgcctgccacaccatcagtgacacgatattcacagaactgcagtgtttgtgggtccagtgggcacagtgtgcagaactgccctgaagtggccatggatatgcagcagccagcagcaagcggctatgcggctagttcctacggctcttcgcctggcgacgccggctcgggtctgtgcttcaaatgcaaccagcccgggcacttctccagagactgtccacagcaggaggctacctcctacaggtctccggtcaccaacgccaatgctaactccggtctgtgctacaaatgcaatcagcccgggcacttctccagagactgcccagggcaggcagctaactcctacgcagcctcagctggtggcaatgccggcgcagcaggcctgtgcttcaaatgcaatcagcctgggcacttctccagagactgcccagggcaggcggctaactcctacggcgcctcagctggtggcaatgccggcgcagctggcctgtgctacaagtgcaaccagcctgggcactttgccagagactgtcaggggcaggctgctgctccccagcgccaggcttacgggaacggcgccgcatcaggagggtacaaccggcagtcctatgtcggtagcttctga

SEQ ID NO: 40 - protein, 970 aa, Secale cereale
MLLSDGLHSQQSMLATTHNHLVKSGALRVGAIVQIHDITCNTIQNRRIIIIVKLEVLQSECDLIGKPRIYEKSLPAGQVPNLPASAAQANNGNYSNGPGMLGNGVAPKVEQSTHNQSYGGPYNGVHSPANPSSGPNNVSPGGSYGTMSAQNTMNGNMVQPNSQRPYNGVHSPVDPSIGRTVQPGPNNVPPGGSYGTMSAQNTMNGNMVQPNSQRPLLNSHQNQRFAVPGAGGGISPPGNVYGRPAQPSYQQPPAAYTNSGPAAKNGAALRTVPISALNPYQRTWTIKARVAAKSQVKHYNNARGPGKLFNFDLRDAHGGEIRAVCFNTQLDQFYDLIEVDKVYLISRGSLKPANKQFNHLNNDYEVTLDSATTIEVCSDDDSSIPRQQFDFRQISEIANMDKDTMVDLLGVVTSVSPSSPFTRKDGAETQKQVLQLRDMSGCSVEITFWGGFCNAEGQQLQSLCDSGSNPVLALRSVRVGEFKGRNVSTIGSSFLKINPDFPAAKSLRQWYITEGKNAAFTSLSMGGSGMGRTDDRKTVEQIKAENLGRSEKPDWITVKGAISHISTDNFCYPACTTEVNGTRCNKKVTNNGDGMWQCDKCDQSTPNCEYRYMLQCQIQDYTGTSYATAFHDAGKDIIGLPAQDLYRIKHEEQEDEKFADIIQKVRFELFLFKLKVKEEVFNDEPRVKCYIVNAQRLEDTSKESRFLLGPIDTLLAEDGLGPTPVVNGAAAVNTGFTSNSTGTYSTNISGPNQFGQRTSSSSMVPATPSVTRYSQNCSVCGSSGHSVQNCPEVAMDMQQPAASGYAASSYGSSPGDAGSGLCFKCNQPGHFSRDCPQQEATSYRSPVTNANANSGLCYKCNQPGHFSRDCPGQAANSYAASAGGNAGAAGLCFKCNQPGHFSRDCPGQAANSYGASAGGNAGAAGLCYKCNQPGHFARDCQGQAAAPQRQAYGNGAASGGYNRQSYVGSF

SEQ ID NO: 41 - DNA, 3357 bp, Oryza sativa
tagtactctccgcctcctccctagggttcccaaaaaccctcccccgaattcgaaatcgaatcgcctcccacatctctctctctcgcggaagcttctggaaggttcggaggcggcggcggcggaggcggcggggacgacgatggagccgcagctgacgccgggggcggtgcaggcgatagcggagcacccggacgggacggggacgatccagccggtgctgcaggtggtggacgtgcggcccgtcaccaccaagaacgcgccgcccacgcccaagcccgccgagcgcttccggatgatgctctccgacggcgtcaacacgcagcagtccatgctcgccaccgccctcaaccccctcgtcaaggacgccacgctccgccccggcaccgtcgtccagctcaccgacttcatgtgcaacaccatccagggtaaaaggattattattgttgtgaaacttgatgttctgcaaaatgactgcattgtaattgggaaccctaaacactatgaaccaaagagtctaactaaggagcaagaccctaacttacaggccagtgtggctcaaaccaataatggaacctattctggtggcgcaagcatgctgggcccctccgttgcgccaagggcagagcaggctgctagcaacagttcatatggtggaccttataatagtgctcaaggaatgttgggttcttctattggcaggacagttgaacctggtcctgcaaatgtttctgctgttggctcttacggtgcaatatcagcacagaacacaacgaatgccaacatgatgcagcctacatctcagctgaacataatgaatgccaacacgatgcagcctacatctcagctgaacacaatgaatgccaacacgatgcagcctacatctcagctgtcctcgttgaaccctaatcaaaaccaaaggtttgcagctcctgcttcgggtggagtctttggccctcctggcaatgcttatgggcagccttcacgtccttcatatcagcagccacctccagtgtatatgaatagagggcctgcctctaggaatgactctgcaactcgtatcatcccaattaccgcgttgaatccataccagcctaagtggacaatcaaggcaagggtgacagcaaagtctgatatcaggcattggagcaatgccaggagttcaggaacagttttctcgtttgatcttcttgatgcacaaggtggagaaattcgtgcacaatgctggaaagaatcggctgataagttttttggccaaattgaggttggtagggtgtatttgatatctagaggatcactgaagcccgcccagaagaagtataacactttgaaccatgattatgaaataactctggatatcgggttatcaactgtcgaggtttgctctgatgatgataacagcatccccaggctgcagtacaatttccggcagatcagcgaactagagaatatggctaacgagaccattgttgatttacttggtgttgttacatcagttagcccttctgcaacaataatgaggaagatcggcactgaaacccggaaaaggtctattcaactgaaggacttgtctggccggagcattgaagtaacattatggggaaacttctgtgatgctgagggtcagcagttgcagttgcagtgtgattctggttcgaaccctataattgcttttaaaggtgcccgtgtgggtgattttaatggcaaatcagtgagcacaattggttcaacccagttaattataaatccagactttcctgaggtggaaaggctgaggcagtggtacatgacagaaggaaaaactgctccttgcatttctttatctcgagaaatgcttaatatgggccggactgatgcccgcaaaacaattgcacagatcaaggatgaaaatttgggacgattagagaagccagactggatcactgttaaggctgcaatctcccatgtgactactgagagtttttgttatccagcttgcccaaagctcttgcccgtcgggaggcagtgtaataaaaaggcaataaataatggtgatgggatgtggcattgtgaccgatgtgatgagagttttcaaaatcctgaatataggtacatgcttaggttccagatccaagaccacactggtagtacctatgctagtgcgttcgatgaggcaggtgagcagatttttggtcgcaaggcaggagaacttttctcgataagaaatgtcgaccaagatgatgcacaatttgcagagatcatagaaggggtccggtggcatctatatctattcaaactgaaggtcaaggaagaaacctacaatgatgagcaaagcttgaaatgcaccgctgtcaaggttgaaaaactggacccatcaaaagagagcaacgtcctacttggagcgattgacaaccttttactggacccaaaggggcaaagtgatcttgcccctaatgctggtttcaccgatccggtaggcggtcacggtgcgcctacatctagcaatgcctatgccatgaatactggtggcgtgaatcagtttgggcagcaagcgagtataagcgccgggatgtctactccactagcagcaacacgaaacttgcagacatgcagcatttgtggagcaaatgggcacagcgcccagatctgccatgtgggtgcagatatggatatgcaggaaacatcagccggtggaagctccatgggtaactacaactccatcgctggcaacggcagctcggagtgttacaaatgtaaacagcccgggcactatgctagagactgtccagggcagtccactggtggcttggagtgtttcaaatgtaaacagcctgggcacttttctagagactgtccagtgcagtctactggtggctcggagtgtttcaaatgtaaacagcctgggcacttcgctagagattgtccagggcagtctactggcgcccagcaccagacatatgggaataatgttgcagcatcaaggggttacaataggcaatcctttgttggtggctactgaagtattttgcaagggaagaagcagcagcagcagcagcatcttgattttgttcatcttggatggcatcggtgtatcgtgtatagttgttaaacctgccttatgtttatgcctttattacctccaatgtccactgggcagggaaccttgtgatctggactttgtatcgctaccttaaaaagtatattgtccttgtctgcaatcttgtaaatttcaatgcctgcttactgcttgatcggcaactatttatagttcgcctaaagtgctcgctctgtaataatatttgggctttgctagtgtgctttcccccccttttggctgggaatctagataatcagataatggcaattgatctgcttggttca

SEQ ID NO: 42 - protein, 951 aa, Oryza sativa
MEPQLTPGAVQAIAEHPDGTGTIQPVLQVVDVRPVTTKNAPPTPKPAERFRMMLSDGVNTQQSMLATALNPLVKDATLRPGTVVQLTDFMCNTIQGKRIIIVVKLDVLQNDCIVIGNPKHYEPKSLTKEQDPNLQASVAQTNNGTYSGGASMLGPSVAPRAEQAASNSSYGGPYNSAQGMLGSSIGRTVEPGPANVSAVGSYGAISAQNTTNANMMQPTSQLNIMNANTMQPTSQLNTMNANTMQPTSQLSSLNPNQNQRFAAPASGGVFGPPGNAYGQPSRPSYQQPPPVYMNRGPASRNDSATRIIPITALNPYQPKWTIKARVTAKSDIRHWSNARSSGTVFSFDLLDAQGGEIRAQCWKESADKFFGQIEVGRVYLISRGSLKPAQKKYNTLNHDYEITLDIGLSTVEVCSDDDNSIPRLQYNFRQISELENMANETIVDLLGVVTSVSPSATIMRKIGTETRKRSIQLKDLSGRSIEVTLWGNFCDAEGQQLQLQCDSGSNPIIAFKGARVGDFNGKSVSTIGSTQLIINPDFPEVERLRQWYMTEGKTAPCISLSREMLNMGRTDARKTIAQIKDENLGRLEKPDWITVKAAISHVTTESFCYPACPKLLPVGRQCNKKAINNGDGMWHCDRCDESFQNPEYRYMLRFQIQDHTGSTYASAFDEAGEQIFGRKAGELFSIRNVDQDDAQFAEIIEGVRWHLYLFKLKVKEETYNDEQSLKCTAVKVEKLDPSKESNVLLGAIDNLLLDPKGQSDLAPNAGFTDPVGGHGAPTSSNAYAMNTGGVNQFGQQASISAGMSTPLAATRNLQTCSICGANGHSAQICHVGADMDMQETSAGGSSMGNYNSIAGNGSSECYKCKQPGHYARDCPGQSTGGLECFKCKQPGHFSRDCPVQSTGGSECFKCKQPGHFARDCPGQSTGAQHQTYGNNVAASRGYNRQSFVGGY

SEQ ID NO: 43 - DNA, 3061 bp, Glycine max
cattccctctctctctctcgaaatggaaccacttatggcgccttctttaaatttttagggtttcgttctctcactctctcttaagcctcttctcccactatcgattcgatccaattcctttggtttccttcctctggatccctatttttttctcccgaaagcaaaagaaagagaaaattaataatggccgtgtccctgacgcagagtgcgataatggagatgtgcagtgcgaattgccccgagggcttgcaaccggtgctgcaggtgatcgagttgaagctggtgcagtcgcagcaaaacagcaacgtcgagaggtaccgtttggttctctccgacggttcacattaccagcaagggatgctcgccacgcagaagaacgacttggttcatgctggaaagttacagaaaggttccgttgttagactcactcagttcatctgcaacgttgtccagagccgcaagattattatcatcgttgacctagatgttgtactggacaaatgtgagctgattggagaacctgtccctgcaccaaaagatgcacctacagaatctgcaactggtcaatcaggagtcacatctgggaatccacaacttttgaatagcagttcacacactggtggcatgcctgctagaccaaatgtggcttcaccatctccagatcatccaaaagtaaatccttctgccagtggtgtttattcaagtaatgcccctcctacttatcctaaagtagagcatggagttagtagatcagcaccattcagtgggtcttctggtggtcagaacacaggtttccgcaatccccaatttgaggcgtcaaggcccttgcaaaactcatatgctcgtccacctcagcagcctatgtaccgtcagccatctccaatgtacactaacagagcgccaatgggaagaaatgaagctgcccccaggataattccaatagcagcattgaatccataccagagtatgtggactattaaagccagggtaacatttaagggagaactcaggcactataccaatgctcgaggtgatggcaaggtgttttcttttgatcttctggattctgatggcggagaaattcgggcaacttgcttcaatgctgtggctgatcagttctacaatgttattgaagctggtaaggtatatctaatttccaggggaagcataaagccagctcagaagaattttaatcaccttcgcaatgatcaagagctgacccttgatgtggcatcaattatacagccatgccttgatgataatgactcaattccatcacagacatttaattatcgccccattagtgaaattgaaagtttggaaaacaacagcattgtggatgtgattggtgtggtgacttctattagtcctacagcttcaatcatgagaaaaaatggcactgaagttcagaagagaactctccagttgaaagacatgtcaggccgaagtgttgagttaactctatggggaaatttttgcattgtagaaggacaaaggttgcaaactatttgtgatgctggggaatttccagttttggctacaaaagctgtcagagtaaatgatttcaatgggaagtctgtcgggactatagccactagtcagctatatgtggagcctgattttcctgaggcttgtacactgaaaagatggtttgaaaatgaagggaagagtgtcccaactctctctatttccagagaaatatctaatctgggtaagactgatgtgcggaagactatatctcaaattaaagatgagaagttagggacttcagagaagcctgattggatatctgtctttgcagctgtttcacacattaaggttgataacttctgttacccagggtgccctctcaagataggggatagacaatgtaacaaaaaggtgactaataacgcagatgggacatggcattgtgaaagatgtaatcagtctattgacacatgtgactttaggtacttactgtcaatgcagatacaggatcacactggcataacatgggttactgctttccaggagagtggtgaggagataatgggtatacctgcaaaagatttgtattatatgaagtatgaagagcaagatgatgataagttttctgaaatcttccacaaggttctcttcaccgagtacatgttcaagttaagaataaaagaggaattctacagtgatgaacaacgtattaagtcaacgatagtaaaagcagaaaaggtaaactttgcttctaaatctagagttaatttggagttgatttttaacgaactcagggctgagaaatcgaaaggtatcaccattcccaactctgtaaccaataatactagactggggagcgttgaaactggacaagttacaccaccagcttattataagagcaatgctaataccagtagagattttgggatgccggcaaatcaagtgggtcaacagcatggaaaccaatatagcaatatttcttctgcaggtgctgctcctggttcatatacatcatgcaccaactgtggagtctctggtcatagctctgcactttgcccaaatattagaaatgtacctggacattctgcaggagggggctttgccaacagggcatctgcgggattaggtggtggtggtggtgcttctgtcgaatgctataaatgtcatcaaagtggtcattatgcaagagattgtcctggtttcagtgcagcacctccatcatcatatgggagcaattcaggtggtggtggttctggcgaatgctttaaatgccatcaaactggccactgggcaagagactgtcctggtctcagtgcagcaccttcatcatatggaagcgctaatgcaatgcagggaagatatggggttgctcaaaagcaacaatttggaggatattgaaatttgttggagttcgttttcattttgtttcaagtattttatcatgtctttgaatatataagcaattttcgtcttaactgttaacttctgtatatacaggaagtgattatgtggtactgaatgctacgtttctttatgcaaacaccgtgcgacgtgcaaaatcatataccagtatatcttttatttccgatca

SEQ ID NO: 44 - protein, 894 aa, Glycine max
MAVSLTQSAIMEMCSANCPEGLQPVLQVIELKLVQSQQNSNVERYRLVLSDGSHYQQGMLATQKNDLVHAGKLQKGSVVRLTQFICNVVQSRKIIIIVDLDVVLDKCELIGEPVPAPKDAPTESATGQSGVTSGNPQLLNSSSHTGGMPARPNVASPSPDHPKVNPSASGVYSSNAPPTYPKVEHGVSRSAPFSGSSGGQNTGFRNPQFEASRPLQNSYARPPQQPMYRQPSPMYTNRAPMGRNEAAPRIIPIAALNPYQSMWTIKARVTFKGELRHYTNARGDGKVFSFDLLDSDGGEIRATCFNAVADQFYNVIEAGKVYLISRGSIKPAQKNFNHLRNDQELTLDVASIIQPCLDDNDSIPSQTFNYRPISEIESLENNSIVDVIGVVTSISPTASIMRKNGTEVQKRTLQLKDMSGRSVELTLWGNFCIVEGQRLQTICDAGEFPVLATKAVRVNDFNGKSVGTIATSQLYVEPDFPEACTLKRWFENEGKSVPTLSISREISNLGKTDVRKTISQIKDEKLGTSEKPDWISVFAAVSHIKVDNFCYPGCPLKIGDRQCNKKVTNNADGTWHCERCNQSIDTCDFRYLLSMQIQDHTGITWVTAFQESGEEIMGIPAKDLYYMKYEEQDDDKFSEIFHKVLFTEYMFKLRIKEEFYSDEQRIKSTIVKAEKVNFASKSRVNLELIFNELRAEKSKGITIPNSVTNNTRLGSVETGQVTPPAYYKSNANTSRDFGMPANQVGQQHGNQYSNISSAGAAPGSYTSCTNCGVSGHSSALCPNIRNVPGHSAGGGFANRASAGLGGGGGASVECYKCHQSGHYARDCPGFSAAPPSSYGSNSGGGGSGECFKCHQTGHWARDCPGLSAAPSSYGSANAMQGRYGVAQKQQFGGY

SEQ ID NO: 45 - DNA, 3261 bp, Solanum tuberosum
cttattttcgttttcgcgcccgcttagttttatcccgcttcctcttttagggttttgaaaacctcttctcctttcactttcccccactctcactctcgcactttctcgagaaaaaaatcgtcgcaattcgccggaaaaatgccgccgattaacttgacggaaggagcaatagagatgctatcgatcggagaagggcatcccgaggagtttaaaccggtgctacagatcacggatgttcggttggtgaatactcagaaccagacaaacaataatgaacgataccggattttgatatcggacggaacgcatattcagcaagggatgttagctacgcagaagaacgatctaattcggtctcaacagattcggaaaggaactattattcagatgaaagagttcgttcgtaatgtcatccagaatcgagtgatcatcattattattgaattagatattttacttgagacgtgtgatcaaattggagacccaaagcattatgtcagaactgatggtagtgtcccttcggtgccacgaccagctgccccgctgcagccttccaccaatcaattaggtggtgtaagtgtaaacccccaatcaattgcttctctttccgctacttcaggctcaactccaagaccaaatatgtcaggaggaatgcaatctccagagatgaaccgtagcagtgtttacaatactgcctctgttgggaatactgactctggacgatatagttcaggtgcacctctttaccccagagcagaatctggtcctgcaatttcacgggctccaatgaattatgtgcgtccacctcagccttcttatcaacagcctcctcagtcttcttatcagcagccatcaccaatgtactccaacagaggacctgtagccaagaatgaagcacctccaaggattattccaattgctgctctcaatccatatcagggtcggtggactatcaaggccagggtaactgcaaagacggaactcagacactacaacaatcaaaggggtgatggaaaagtattctcttttgatcttcttgattccgatggaggagaaataagggtgacttgttttaactctgtagctgaccaattttatgaccagattgaaccaggtagagtgtatcaaatttcaaaaggaagcttgaaaccagctcagaaaaattacaatcaccttccaaatgaccatgaaattatgctcgagagcacgtctgtagttcaaccttgttttgaggatgacagggctattcctcagcagcaatttcattttcggccaatcagtgacattgaagccatggagaacaacaatgtgatagatgtcattggtgtggtgtcttcaataagtccatctagttcaataatgaggaaaaatggtacagaaactcagaagagagtcctccagctgaaggacatgtctggtagaagtgttgaagtaactttgtggggaaatttctgcaatgcagaaggtcaaacacttcagagtctctgtgattctggggctttccctgtcttggcagttaaagctggtagagtaaatgattttaatggcaaatctataggtactatatctacaagcaagttgtttatagaaccagattttcctgaagctctgaaaacgaaggcatggttcgaaagggagggaaagaacatgccatctatgtcattgtcacgagaagtgagcagtattggtcggacagatgtgcggaagactatatctcaaatcaaagatgagaagttaggcacttctgagaaaccagattggatcactgtaagtgccagtgttacatttataaaggttgacaatttttgctatactgcatgtcccctcatgataggagatagacagtgcaacaaaaaagtgacaaataatggggatgggaaatggcggtgtgacaggtgtgatcagactgttgatgaatgtgaatataggtacattcttcggttccagattcaggaccatactggcttaacatgggttactgcatttcaagaatgtggtgaccagataatgggtgtatctgcaaaagaattgtatttcttaaaatatgaggagcaggatgatgataggtttgcagaaatcatgcgtaatgtgttattcaaccagtttatatttaaattgaaagtgaaagaagagatgtatagtgatgagcagcatgttaagtcaacagtggtcaaagctgagaagctgaacttccaaccagagaccaggtttctgtttgacctgataaacaagattaatgggcaggaatccagcactttacctcctaagacagatgatgcaactctgaattcagggtttaataatactggatttgggaataaacgcaaagaaccaatgagccctgttgcaagttatggtgtcagccatagcggtatcagcagagatagtggactgcagggaaatcggcaaggtccatatgggaatcagcttacaggctcacagttcgctccgcctggctctactgcaggcagtatcagcagagaaagtggactgcagggaaatcggcaaggtccatatggaaatcagcctactggaacacaaaatgctccaactggctcttctacaggcatgtatatgagctgtaatagttgtggtggaacaggtcatagtgcttcaaactgtccaagcatgatgagtggtcagagccaggcatatggaggtggttttggcaatagggcaacttcagggatgagcagtggtggtggtggtggtggtggtggtggtgagtgttataaatgccatcagtatggacattgggcaagagattgcccaggcgtaagcaatgcacctgctgccaataacatgacatcaggaagatacgggaatactccaaggcaacacgtcggtggtttttgatgaacctttttgagcgcataaagttgtcctgtacaggtttagatgtcttctcttagtggttcatcatggctcatgttctgcttttgagaaagcttcttgagggcttgcgttttgcctttctgtacagtggtcgcatggggcttaaattatgcgtcactgttcctggacgagagtgcactacaagtcttgtcgtccttgttttgaggagtgacatttcgttgctctttccttgtaaattatagtcttgcattatcatctcttttcgtctttctttttttgagttcttttaggtaatctttctttgtggtttcgaccttttaagataaaaactcttgtgttacagtttagactaacatgtgtatgttgtcacatctttttaatctgtcacatgtcatctttatttat

SEQ ID NO: 46 - protein, 905 aa, Solanum tuberosum
MPPINLTEGAIEMLSIGEGHPEEFKPVLQITDVRLVNTQNQTNNNERYRILISDGTHIQQGMLATQKNDLIRSQQIRKGTIIQMKEFVRNVIQNRVIIIIIELDILLETCDQIGDPKHYVRTDGSVPSVPRPAAPLQPSTNQLGGVSVNPQSIASLSATSGSTPRPNMSGGMQSPEMNRSSVYNTASVGNTDSGRYSSGAPLYPRAESGPAISRAPMNYVRPPQPSYQQPPQSSYQQPSPMYSNRGPVAKNEAPPRIIPIAALNPYQGRWTIKARVTAKTELRHYNNQRGDGKVFSFDLLDSDGGEIRVTCFNSVADQFYDQIEPGRVYQISKGSLKPAQKNYNHLPNDHEIMLESTSVVQPCFEDDRAIPQQQFHFRPISDIEAMENNNVIDVIGVVSSISPSSSIMRKNGTETQKRVLQLKDMSGRSVEVTLWGNFCNAEGQTLQSLCDSGAFPVLAVKAGRVNDFNGKSIGTISTSKLFIEPDFPEALKTKAWFEREGKNMPSMSLSREVSSIGRTDVRKTISQIKDEKLGTSEKPDWITVSASVTFIKVDNFCYTACPLMIGDRQCNKKVTNNGDGKWRCDRCDQTVDECEYRYILRFQIQDHTGLTWVTAFQECGDQIMGVSAKELYFLKYEEQDDDRFAEIMRNVLFNQFIFKLKVKEEMYSDEQHVKSTVVKAEKLNFQPETRFLFDLINKINGQESSTLPPKTDDATLNSGFNNTGFGNKRKEPMSPVASYGVSHSGISRDSGLQGNRQGPYGNQLTGSQFAPPGSTAGSISRESGLQGNRQGPYGNQPTGTQNAPTGSSTGMYMSCNSCGGTGHSASNCPSMMSGQSQAYGGGFGNRATSGMSSGGGGGGGGGECYKCHQYGHWARDCPGVSNAPAANNMTSGRYGNTPRQHVGGF

SEQ ID NO: 47 - DNA, 3233 bp, Solanum lycopersicum
acttattttcgttttcgcgcccgctcagtgttatcccgcttcctctttttagggttttgaaaccctcttccccatttcactttcactttctcgaggaaaaaaccgtcgtaatttcgccggaaaaatgccgccgattaacttgacggaaggagcagtagagatgctatcgatcggagaaggtcatcccgaggagtttaaaccggtgctacagatcacagatgttcggttggtgaatactcagaatcagactaacaataatgaacgataccggcttttgttatcggacggaacgcatattcagcaaggaatgttagctacgcagaagaacgatctaattcggtctcaacagattcggaaaggaactattattcagatgaatgagttcgttcgtaatgtcatccagaatcgagtgatcatcattattatcgaattagatattttagttgacacgtgtgatcaaattggagacccaaagcattatgtcagaactgatggtagtgctccttcggtgccacgaccagctgccccactgcagccttccaccaatcaattaggtggtgtaagtgtaaacccccaatcatttgcttctctttctgctacttcaggctcaactccaagaccaaatatgtcaggaggaatgcaatctccagagatgaaccgtagcagtgtttacaatactacctctgttgggaatactgactctggacgatatagttcaggtgcacctctttaccctagagcagaatctggtcctgcaatttcacgggctccgatgaattatgtgcgtccacctcagccttcttatcaacagcctcctcagtcttcttatcagcagccatcaccaatgtactcgaacagaggacctatagccaagaatgaagcacctccaaggattgttccaattgctgctctcaatccatatcagggtcggtggactatcaaggccagggtaaccgcaaagacagaactcagacactacaacaatcaaaggggtgatggaaaagtattctcttttgatcttcttgattctgatggaggagaaataagggtgacttgttttaactctgtagctgaccaattttatgaccagattgagccaggtagagtgtatcaaatttcaaaaggaagcttgaaaccagctcaaaaaaattacaatcaccttccaaatgaccatgaaattatgctcgagagcacgtctgtcgttcaaccttgttttgaggatgacagggctattcctcagcagcaatttcattttcggccaatcagtgacattgaagccacggagaacaataatgtgatagatgtgattggtgtggtgtcttcaataagtccatctagttcaataatgaggaaaaatggtacagaaactcagaagagagtcctccagctgaaggacatgtctggtagaagtattgaagtaactttgtggggaaatttttgcaatgcagaaggtcaaacacttcagagtttgtgtgattctgggtctttccctgtcttggcagttaaagctggtagagtaaatgattttaatggaaaatctataggtactatatctacaagcaaattgtttatagaaccagattttcctgaagctctgaaaacaaaggcatggtttgaaagggagggaaagaacatgccatctatgtcattgtcacgagaagtgagcagtgttggtcggacagatgtgcggaagacaatatctcaaatcaaagatgagaagttgggcacttctgagaaaccagattggatcactataagtgccactgttacatttataaaagttgacaatttttgctatactgcatgtcccctcatgataggagatagacagtgcaacaaaaaagtgacaaataatggggatgggaaatggcggtgtgacaggtgtgatcagactgttgatgaatgtgaatacaggtacatacttcagttccagattcaggaccatactggcttaacatgggttactgcatttcaagaatgtggtgaccagataatgggtgcatctgcaaaagaattgtatttcttaaaatatgaggagcaggatgatgataggtttgcagaaatcatgcgtaatgtgttattcaaccagtttatatttaaattgaaagtgaaagaagagatgtatagtgatgagcagcgtgttaagtcaacagtggtcaaagctgagatgcttaacttccaacaagagaccaggtttctgttcgacctgataaacaagattaatgggcaggaatccagcactttaactcctaagacaggtgatgcaactccaaattcagggtttaataatgctggatttgggaataaactgaaagaaccaatgaaccctgttgcaagttatggtggcagccatatcagcagagatagtggactgcagggaaatcggcaaggtccatatgggaatcagcttattggctcacagtttgctccttctggctctactgcaggcagtatcagcagagaaagtggactgcagggaaatcggcaaggccaatatggaaatcagcctagtggaacgcaaaatgctccgactggctcttctgcaggcatgtatatgagctgtaatagttgtggtggaacaggtcatagtgcttcaaactgtccaagcatgatgagtggtcagagccaggcatatggaagtggttttggcaatagggcaacttcagggatgagcagtggtggtggtggtggtgagtgttataaatgccatcagtatggacattgggcaagagattgcccaggtgtaagcaatgcacctgctgccaataacatgacatcaggaagatatgggaatactccaaggcaacacgttggtggtttttgatgaacctttgagcacataaagttgtcctgtacaggtttagatgtcttctcttagtggctcatcatggctcatgttctgcttttgagaaagcttcttgaggggcttgcgttttgcctttctgtacagtggtcgcttggggcttaaattatgcatcacggctcctggacgggagtgcactacaagtcttgtcgtccatgttttgaggagtgacgtttcgttgctctttctttgtaaattgtagtcttgcattatcatctcttttcgtctcttctttttgagttcttttaggtaatctttcgttgtggtttcgaccctttaagataaaaactcgtgtgttacagttcagactgacatgtttatgttgtcacatctttttcatttgtcacatgtcatctttatttattcgcta

SEQ ID NO: 48 - protein, 898 aa, Solanum lycopersicum
MPPINLTEGAVEMLSIGEGHPEEFKPVLQITDVRLVNTQNQTNNNERYRLLLSDGTHIQQGMLATQKNDLIRSQQIRKGTIIQMNEFVRNVIQNRVIIIIIELDILVDTCDQIGDPKHYVRTDGSAPSVPRPAAPLQPSTNQLGGVSVNPQSFASLSATSGSTPRPNMSGGMQSPEMNRSSVYNTTSVGNTDSGRYSSGAPLYPRAESGPAISRAPMNYVRPPQPSYQQPPQSSYQQPSPMYSNRGPIAKNEAPPRIVPIAALNPYQGRWTIKARVTAKTELRHYNNQRGDGKVFSFDLLDSDGGEIRVTCFNSVADQFYDQIEPGRVYQISKGSLKPAQKNYNHLPNDHEIMLESTSVVQPCFEDDRAIPQQQFHFRPISDIEATENNNVIDVIGVVSSISPSSSIMRKNGTETQKRVLQLKDMSGRSIEVTLWGNFCNAEGQTLQSLCDSGSFPVLAVKAGRVNDFNGKSIGTISTSKLFIEPDFPEALKTKAWFEREGKNMPSMSLSREVSSVGRTDVRKTISQIKDEKLGTSEKPDWITISATVTFIKVDNFCYTACPLMIGDRQCNKKVTNNGDGKWRCDRCDQTVDECEYRYILQFQIQDHTGLTWVTAFQECGDQIMGASAKELYFLKYEEQDDDRFAEIMRNVLFNQFIFKLKVKEEMYSDEQRVKSTVVKAEMLNFQQETRFLFDLINKINGQESSTLTPKTGDATPNSGFNNAGFGNKLKEPMNPVASYGGSHISRDSGLQGNRQGPYGNQLIGSQFAPSGSTAGSISRESGLQGNRQGQYGNQPSGTQNAPTGSSAGMYMSCNSCGGTGHSASNCPSMMSGQSQAYGSGFGNRATSGMSSGGGGGECYKCHQYGHWARDCPGVSNAPAANNMTSGRYGNTPRQHVGG

SEQ ID NO: 49 - DNA, 3189 bp, Sorghum bicolor
accctccccctcccactcccccacaaatcgaatcgcctcctccccattcccccctctcctctcctctcctctcgggcgcgatggcggcgcagctgacgaccggcgcggtggcggcggtgtcggagcacgcggacggcaacgggacgctgcaacccgtgctgcaggtggtggacgtgcggatagtccccaacgtcaagagcgccaccaaccaagagcgcttccggatgctgctctccgacggcacccacaccatgcagtccatgctctccacctccgagaacgcgcgcatccgggacggcatcatcaagaagggctccatcgtccacctccacgagttcacctgcagcaccatccagcaccgcaggatcattatcattatcaaacttgatgttctgcaaactgagtgtgctataattggagaccctaaaccctatgatgtgagaatccaacctaataatgagcagggcaccaacattccggccaattctgctcaagctaatacaggaacatattccagcggccctggtatgctgggatcttctgctgctccaaggccagtgcaagatgctaacaatgtaccatatggatcttctgctgctccaaggccagtgcaagatgctaacaatgtaccatacggatcttctgctgctccaaggccagtgcaagatgctaataataatgtaccatatggtggatcctatggtggttatcagggtacggtggtccctccagttggtcgtgcagtagaatctgttcccaatgtggcatctggtgtatcttatggtacgactttggcacataataatacaatgaatgtgggcatggtgcagtcaaacttgcagcagccttcactggattctcatcagaaccaaaggtttgcagttccttccatggctggtggcagtggtgctcctgggaatacatacggccaacctgcacagtccttttatcagcaaccgcctccagggcatatgaatagaaaccctgtgtctaagaatgatgcaagtcgtcttgtcccagtggctcatttgaacccctatcaaaacacatggacaatcaaggctagggtgactgcaaaaactgatctcaggcactacaacaacaagaatggtgctggaaaagtcttctcctttgatatccttgatggacagggtggagaaatccgtgtaacatgcttcaatgcgcaggctgatcagttttttgacctcattgaggttgataaggtgtacctgatatctaaagggtcagtgaaagcagcacagaagaagtttaactctttgaatcacgagtatgaaatagctctggatttcagatcatctatcgaagtatgtgttgatgatgatagcaacatccctaggccgcattataatttccggcagataagcgaaattgagaaccttgaggcaggtactattgtggacttgattggaattgttacatcagttggcccttctggcacaataatccgaaagcttgataactcggaagtccagaaaagaaatcttcaactaaaagacatgtctggtcgaagcatagaacttaccttatggggaaagttctgtgatgctgaaggccagcagctgcagttgcagtgtgattctggtctgaatcctgttctagctttgaaaggtgctcgagttactgaattcagtggtaaatctgtcaacacaaccggctcaactcatgtaaaagtagacccagactttcctgaggctgagagtctgcggcgatggtatgcaactgaagggaagacagctgcttgtgtttctttgtcagtggtaagtatgggcaggactgatgtccggaaagcagtggctcagatcaaggatgaagatctgggtcgatcagagaagccagactttatcactgttaaaggtgcaatttcacatctgaccactgataatttttgttatcctgcttgcaccttggaggtgaacggtaaggtgtgcaacaaaaaggtaataaataatggtgatggaacatggcagtgtgacaaatgcgacaagagcttaccaaattgtgagtatagatacttgttgcagtgccaggtccaggaccacactggggtcacctatgctactgcattccaagaggctggtattgagattgttggccacagcgcctacgagctctacaacataagagaagaagacccagaaagatttgctgagatcttacagggggttcgctggcagcagtttctattcaaactgaaagtctatgaggagacctataacgatgagcaccgtgtcaagtgcaacattttgagagcggagaagctggatccagcaaaagagagttcttaccttctgggggtaatcaatggcctattgcaggatgatactggctcaccttctgaggcgcaaggccccatggcctataatgctggtcttagcaacactggcgccggacgaagcgtgccaacctccaacagtgcctacactaccaatatgagtggtcctaggtatggggagtcagcgaaccagtttgcgcagcaagcaaacacgtatattggggcgtccactccagtgtcggcgacacggaatgtgcagacctgcatgtcttgcgggtcaagtggacacaatgcgcaaaactgccctgcaggcatgtataagcagcaacctgcggcaagcacagcaagctcctatggctcttcgcaacctcgcaacactggccccagaccgtgtttcaaatgcaatcagatcgggcactttgcggactcttgcccacttctggcccctgctccccagcagcagcagcagcagtatcggagcggtggcgcttcatcaggtggttatggtcagcagcagtatcggagcggcggcgcttcgtcaggtggttatggtcagcagcagtcctatcttggagctaccaactactgaaagtcagtatccatcgaatcaggcgtgatgttggttttgcttagatgcctgtcctgaatggcatcgctgcgtctatgtaatgtagatacctaatgttccttttgtgtttgtgtgaagttggaaccatgtatcggtacttctatatgtttttcgtcttatatggtgtgttataaatcctcgttgctgtgtcagttctgttgaatccgtggtttgtccagctttgcatggtgcttgtaaatcaggcgtacgtactgtataatgcaactcatctttagattgtcaacagttaatttttgctccaggttca

SEQ ID NO: 50 - protein, 933 aa, Sorghum bicolor
MAAQLTTGAVAAVSEHADGNGTLQPVLQVVDVRIVPNVKSATNQERFRMLLSDGTHTMQSMLSTSENARIRDGIIKKGSIVHLHEFTCSTIQHRRIIIIIKLDVLQTECAIIGDPKPYDVRIQPNNEQGTNIPANSAQANTGTYSSGPGMLGSSAAPRPVQDANNVPYGSSAAPRPVQDANNVPYGSSAAPRPVQDANNNVPYGGSYGGYQGTVVPPVGRAVESVPNVASGVSYGTTLAHNNTMNVGMVQSNLQQPSLDSHQNQRFAVPSMAGGSGAPGNTYGQPAQSFYQQPPPGHMNRNPVSKNDASRLVPVAHLNPYQNTWTIKARVTAKTDLRHYNNKNGAGKVFSFDILDGQGGEIRVTCFNAQADQFFDLIEVDKVYLISKGSVKAAQKKFNSLNHEYEIALDFRSSIEVCVDDDSNIPRPHYNFRQISEIENLEAGTIVDLIGIVTSVGPSGTIIRKLDNSEVQKRNLQLKDMSGRSIELTLWGKFCDAEGQQLQLQCDSGLNPVLALKGARVTEFSGKSVNTTGSTHVKVDPDFPEAESLRRWYATEGKTAACVSLSVVSMGRTDVRKAVAQIKDEDLGRSEKPDFITVKGAISHLTTDNFCYPACTLEVNGKVCNKKVINNGDGTWQCDKCDKSLPNCEYRYLLQCQVQDHTGVTYATAFQEAGIEIVGHSAYELYNIREEDPERFAEILQGVRWQQFLFKLKVYEETYNDEHRVKCNILRAEKLDPAKESSYLLGVINGLLQDDTGSPSEAQGPMAYNAGLSNTGAGRSVPTSNSAYTTNMSGPRYGESANQFAQQANTYIGASTPVSATRNVQTCMSCGSSGHNAQNCPAGMYKQQPAASTASSYGSSQPRNTGPRPCFKCNQIGHFADSCPLLAPAPQQQQQQYRSGGASSGGYGQQQYRSGGASSGGYGQQQSYLGATNY

SEQ ID NO: 51 - DNA, 3285 bp, Beta vulgaris; identical to SEQ ID NO: 27

SEQ ID NO: 52 - protein, 1095 aa, Beta vulgaris; identical to SEQ ID NO: 28

SEQ ID NO: 53 - DNA, 4500 bp, Zea mays; identical to SEQ ID NO: 29

SEQ ID NO: 54 - protein, 1208 aa, Zea mays; identical to SEQ ID NO: 30

SEQ ID NO: 55 - DNA, 4101 bp, Brassica napus; identical to SEQ ID NO: 31

SEQ ID NO: 56 - protein, 1203 aa, Brassica napus; identical to SEQ ID NO: 32

SEQ ID NO: 57 - DNA, 3640 bp, Helianthus annuus; identical to SEQ ID NO: 33

SEQ ID NO: 58 - protein, 1140 aa, Helianthus annuus; identical to SEQ ID NO: 34

SEQ ID NO: 59 - DNA, 2496 bp, Hordeum vulgare; identical to SEQ ID NO: 35

SEQ ID NO: 60 - protein, 756 aa, Hordeum vulgare; identical to SEQ ID NO: 36

SEQ ID NO: 61 - DNA, 2052 bp, Secale cereale
atgagggtgctggagcttggggcctatgatgccatattaggcatggactggctggagcagttcagtcctatgatctgccattggcgtcagaaatcattaacatttgattatttgggaaaacctgttacactgcagggtgtcctatctaaaccccaagagtcactccaggaaatgtctgtggaacagttaaataagtggatttctgggaatgaggtctgggccatggctatgattgatcctatacaacaaaccacaaaatctgtacccgacatagtgcaatcagatatgcaggctttactcgaggaataccatgatgtttttgatcagcccactactttaccaccacatcgtgccttggatcattcgatctcattagaaccaggagctcatccaacaaacagtcggccctaccggtactctccattgcaaaaggacgagatcgaacgtcaggtatgtgaaatgcttgacaaaggggtgattcagacaagcatgagccctttcgcgtctccagtgctgttagttaaaaagaaggatgacacttggcgattttgtgttgattatcgtcgcttgaattccgtaactgtgaagaacaagtttcccctaccagtggttgatgagttgctggacgaattggttggcactaaatttttctccaagttagatttacgcgcaggataccatcaaattcgcatgaggccagcggatgaagaaaagacagcttttaaaacacatcacggccactttcaattccgtgtgatgccattcggattaacgaatgcgccagccacatttcagtgcattatgaatctcatttttgccaaatacctccgcaagtttgtgatagtatttctggacgatatcttgatctacagttcatcttgggaagagcatttagagcatctgcgtctggtgtttgaaacacttcgtcaggctcaattctttgctaagttatccaagtgttcttttgggcagaacagtattcagtatcttggccacattatctctgattccggtgttgcaaccgatcccgagaaaacagtggtggtggaacagtggccaattcctaagacagcaactgaactacgaggattccttggcctaacaggttattaccgtaaatttgttaaacattatagtctaattgctaaaccactgtcccaacttctgaccaaaaagggtttctactggaatgaacaagcaacacaagcattccttgctctgaaacaagccatggcacaggcacctgttctggctttgcccaatttttcagagcctttcactgttgaaaccgacgcttgtgacactggagtgggggcagtgttaatgcagaaaggacatccaattgcatacatgagcaaggctcttgggatacttaactgtaaaatgtccatctatgaaaaagaattccttgctgtgatcatggctgtggataagtggcgtccttatttgcagcgcggcccatttcagatagtcaccgaccataagagcctctgcaacctagaggatcaaattttgactactgatttgcaacgcaaggcaatggccaagctggtgggtttacaatttcagatcaagtacagaaagggcagtgataatggtgctgctgattccttgtctcgagtgggccatttattggaagtatatgccatttccaccttgcaacctgactgggtccaggaggtttccaattcctatgtcactgacacaatggccacccagctcttacaagaactggcaattcaatctcctaatgcaaaaggttatgcattgaagaaaggcctcattacttacaaaggcagaatgtatattggtgaaaatcttgccctacaaactaagctgatagcagctcaccatgatactgcagtgggaggccattcaggtattcaggccacataccacagattgaagcagctgtattattggccaggtcttaaggttgatgtggaaaattacatccatcaatgtatagtgtgtcaacaagcaaagcacactaatacaaaaccagctggtcttctgcaaccattgccaccccctgacagtccttggactgaa

SEQ ID NO: 62 - protein, 684 aa, Secale cereale
MRVLELGAYDAILGMDWLEQFSPMICHWRQKSLTFDYLGKPVTLQGVLSKPQESLQEMSVEQLNKWISGNEVWAMAMIDPIQQTTKSVPDIVQSDMQALLEEYHDVFDQPTTLPPHRALDHSISLEPGAHPTNSRPYRYSPLQKDEIERQVCEMLDKGVIQTSMSPFASPVLLVKKKDDTWRFCVDYRRLNSVTVKNKFPLPVVDELLDELVGTKFFSKLDLRAGYHQIRMRPADEEKTAFKTHHGHFQFRVMPFGLTNAPATFQCIMNLIFAKYLRKFVIVFLDDILIYSSSWEEHLEHLRLVFETLRQAQFFAKLSKCSFGQNSIQYLGHIISDSGVATDPEKTVVVEQWPIPKTATELRGFLGLTGYYRKFVKHYSLIAKPLSQLLTKKGFYWNEQATQAFLALKQAMAQAPVLALPNFSEPFTVETDACDTGVGAVLMQKGHPIAYMSKALGILNCKMSIYEKEFLAVIMAVDKWRPYLQRGPFQIVTDHKSLCNLEDQILTTDLQRKAMAKLVGLQFQIKYRKGSDNGAADSLSRVGHLLEVYAISTLQPDWVQEVSNSYVTDTMATQLLQELAIQSPNAKGYALKKGLITYKGRMYIGENLALQTKLIAAHHDTAVGGHSGIQATYHRLKQLYYWPGLKVDVENYIHQCIVCQQAKHTNTKPAGLLQPLPPPDSPWTE

SEQ ID NO: 63 - DNA, 4219 bp, Oryza sativa
ttatttcacccgtttggcctttccccctcttctggccacctcggcggttcgtcgccggcggcgatggcggcgacggtgcggttcgggctgctggtggcgatgttccaggccatgtcgcgggaccgcacggcggcgaagaagcgggcgcggctccgcgcgctcctcgaccgcgcctacgggcccggcggcagggacgactacttcagcgcgctccgcctcgtgctcccggggctcgaccgcgagcgcggctcgtacgggctcaaggaggccgcgctcgcctccgtcctcgtcgacgccctcgggatagccaaggactcgcccgacgccgtgcggctcaccaactggcggcgcgggggcggcttccgcaacgccggcaacttcgcactcgtcgccgctgaggtgctacagcggagacaaggaatgacttctgggggattgacaataaaagaggtgaatgacgcacttgatcgcctggctgcaactgagaataggtctgagaaggcttcgattctttctagtctgatcaagaaaaccaatgcccttgaaatgaagtggctcttgatgattattctgaaagatttgaaattggggatcagtgagaagagcgtatttcatgagttccatcctgatgctgaagacttgttcaatgtcacttgtgacctgagattggtctgtgaaaagcttaatgatcgaagtcagaggcataagcgccaggatatagaagtggggaaggctgtcaggcctcagctatctatgagagtcaataatgcctcatctgcttggaagaagcttcacggaaaacaagtggttgctgagtgcaaatttgacggtgaccgtattcaaattcacaagaatggggaagagattcatttcttctcaaggagctttcttgatcactcagaatatgcacctggaatgtccaaagttattatagaaaatatcttggttgacaggtgtattttggatggagaaatgcttgtttgggatactgtgcttaatcggtttgcagaatttggatcaaaccaggaaatagcaaaggccgcaaaggaggggctggagactgatcgacagttgtgctatgttgcttttgacattctttatgctggagacaccagtgttatccaccaaagtttgacagagcggcatgaaattctgcagaaggttgtcagacctttgaagggccatctggaaatattagttccaacaggtggcctgaacatccatcgtccgccagatgaaccatgctggtccattttggcacatagtcttgatgatgtggagaaattcttcaaggacactgttgataatagagaagagggaattatactaaaggaccttgagtccaaatgggaacctggtgaccggagtggaaagtggcttaaattaaagcctgattatatacatgctggtgctgatcttgatgttattattataggtgggtattatggctcaggacgtcgaggaggagaggttgcccagtttttagttggtcttgcagtgccttctgacgacaatagttatcccaaaagatttctttctttttgccgagtcggtactggtctttctgatgaagagcttgacgctcttgtcaccaaattgaagcctcatttcaggaaaaatgaataccccaaaaaaccaccaagattttatgaagtgacaaaccattcaaaggagaggccagatgtttggatagaaagccctgataagtcagtcataatatccataacaagcgatattcgaacaatcaaatctgaggtatttgctgccccatacagcttaaggttcccccgcattcaacggttgagatacgataagccatggcacgagtgccttgatgttcaggcatttgtggacatcgtacattcaagtaatgggacaactcacagggcggcagatgatgataatgatctgaagaatgttaaggtaaaacaaccgagaacaaacaaaaagggggagaaaaagaatgtgtcaatcatcccttcacatcttatgaagactgacatctcaggcctaaagggagaaacacttatatttgcaaatacaatgttttattttgtcaacatacctccatcatataatctcgactattttcataaactggttgtggagaatggcggatctttctcgatgaatcttaatgactcagttactcattgcatagcagcggagaaaaaaggtatcaaatatcaggcagccacacggcagggaaggatcattcattattcctggatcttagactgttgcaaggaaaaacgccttcttcatttgcagcctaagtatatcctctttcttgcagattttgcaaggcacaaatttcctgaagagatcgactcatatgccgactatttctactgggacattgatatttctgacctcaagcagattttcagcaatatggacagagctgttgttgattcaaacatggtacaccactacaaaaagaagtattgcgcagatgagagattctgcttcttccagggttgctgtgtctacttctatcatgcacccttggtgaatgcggactacaatgtaatatctgatcttgcactcaagagagtgaagcaggaccttaccatgcatggtggtcaagtgtgcagcattcttgctcccgctactcatttgattatagtttcagttctacaagcctacaattttgacatgctgtacaagagcctccctcctgccgagaggcgttatctacatgacaaaagattgcaggttgtcagtaacaagtggttggaagattcagtggaaaaacaaacaaggctgcctgaaaccacttacagccttaaaccggatacactagaagaaatagaaattgaacgaagtgaggaaactgttcagccttgtaatgacaagcttgaggaaaatgagaaggctgatacatctcatgttaagcatgcaccaaggaaaaggggaaggccatccagtagtgcctcaagaactgcaaagcctgctcctagaccagtccgaagaacaagagctagaagaggaaatcaacatgcaaaaatagatgatgttgagcctgaagaaagtgaccatggtgaaacaggtctagatgatcaaataccagacacagataacatctctaaaatggaagtagatagctttgacaaagaccaagtttctgctagaccagtccgaagaacaagggctaggagaggaaaacagcatgccaaaatcgattatggtcaatctgaagaaagtgatcctggtgaaacaggacaggatgatcaaaggttggatgcagattacatctctaagatggaagaagatagcagtgacagagaccagggggcacatccaaccgctcctagagtggtccgaagatcaagggctcaaagaggaaagtggcttgcaaagatagatcgtgaaacaggtcctggtgaaacaggtcaagatgataagaagttgaacgcagattccatctctaagatggaagaacatgcccatgacaaggatcaagaaccacctccaggtgcccagcttatcacattggatgagcaggagcccaaaggaatcaaatcgagtaccacggagacaccaagcagcccaaaacacgaacgcaaccaaacagttcttagaagagacaccgctgaaacaacgagtagcgcaacgtgcgagaagatggaacagatggttgatccgctgcacgcaatgctcctggacatgattccatcgcttggccagatgaagacggacgttggtaacagggttgccgaagccaaagctgagacgaatccaccttgggtaggaagctccacatccagttacgtggctccagtgccacaggcctcagcgagttctgcatccagttctggtgttccggcaccacacgcaggaagctccacacagagtaccggggttccagccccagatccaactgctggtgctccaaagaagaaaaaggtcagttacaaggacgtcgccggtgcacttctgaaggattggtgacaaatagtactgaatgctgccacttcgggtaacctgtacgctgtatattccccatctttcattaatctgcacggccctgtaggctgtgacaaatgcttgtgaatgtccctgttcttagctctgaacgtccgtgaagattctgacaagaatggcgctagtagtttggtcgaaaatgacacttggcccgtgtttttcttcgcgctccccgttgttgagaacggcgtgatggctagtagttgagagcttctacttccgattgataaca

SEQ ID NO: 64 - protein, 1296 aa, Oryza sativa
MAATVRFGLLVAMFQAMSRDRTAAKKRARLRALLDRAYGPGGRDDYFSALRLVLPGLDRERGSYGLKEAALASVLVDALGIAKDSPDAVRLTNWRRGGGFRNAGNFALVAAEVLQRRQGMTSGGLTIKEVNDALDRLAATENRSEKASILSSLIKKTNALEMKWLLMIILKDLKLGISEKSVFHEFHPDAEDLFNVTCDLRLVCEKLNDRSQRHKRQDIEVGKAVRPQLSMRVNNASSAWKKLHGKQVVAECKFDGDRIQIHKNGEEIHFFSRSFLDHSEYAPGMSKVIIENILVDRCILDGEMLVWDTVLNRFAEFGSNQEIAKAAKEGLETDRQLCYVAFDILYAGDTSVIHQSLTERHEILQKVVRPLKGHLEILVPTGGLNIHRPPDEPCWSILAHSLDDVEKFFKDTVDNREEGIILKDLESKWEPGDRSGKWLKLKPDYIHAGADLDVIIIGGYYGSGRRGGEVAQFLVGLAVPSDDNSYPKRFLSFCRVGTGLSDEELDALVTKLKPHFRKNEYPKKPPRFYEVTNHSKERPDVWIESPDKSVIISITSDIRTIKSEVFAAPYSLRFPRIQRLRYDKPWHECLDVQAFVDIVHSSNGTTHRAADDDNDLKNVKVKQPRTNKKGEKKNVSIIPSHLMKTDISGLKGETLIFANTMFYFVNIPPSYNLDYFHKLVVENGGSFSMNLNDSVTHCIAAEKKGIKYQAATRQGRIIHYSWILDCCKEKRLLHLQPKYILFLADFARHKFPEEIDSYADYFYWDIDISDLKQIFSNMDRAVVDSNMVHHYKKKYCADERFCFFQGCCVYFYHAPLVNADYNVISDLALKRVKQDLTMHGGQVCSILAPATHLIIVSVLQAYNFDMLYKSLPPAERRYLHDKRLQVVSNKWLEDSVEKQTRLPETTYSLKPDTLEEIEIERSEETVQPCNDKLEENEKADTSHVKHAPRKRGRPSSSASRTAKPAPRPVRRTRARRGNQHAKIDDVEPEESDHGETGLDDQIPDTDNISKMEVDSFDKDQVSARPVRRTRARRGKQHAKIDYGQSEESDPGETGQDDQRLDADYISKMEEDSSDRDQGAHPTAPRVVRRSRAQRGKWLAKIDRETGPGETGQDDKKLNADSISKMEEHAHDKDQEPPPGAQLITLDEQEPKGIKSSTTETPSSPKHERNQTVLRRDTAETTSSATCEKMEQMVDPLHAMLLDMIPSLGQMKTDVGNRVAEAKAETNPPWVGSSTSSYVAPVPQASASSASSSGVPAPHAGSSTQSTGVPAPDPTAGAPKKKKVSYKDVAGALLKDW

SEQ ID NO: 65 - DNA, 3860 bp, Glycine max
gaagtctcggtattcactttgtgtttctctcacaagtaacaactgaaccaacataaatactgtataaatcactctcacaaacaaaaacgccttagcggttaatcgaagttcaaaacttcaaatgacggagcaaaccaagctgagcgtgctctgcagcctcttcacgtggacacagcggagcaagtctgcggcgaagaagcgcgccaagttccgcaagttcctcgacgccttctgcaccgaccacaacttcttccccgccgtccgcctccttctcccgaacctcgaccgcgagcgcggctcctacggcctcaaggagtccgtcctcgccacctccctcatcgacgccctcggcatctcccgcgactcccccgacgccctccgcctcctcaattggcgcaagggcggcgccgccaccggccccaccgccggcaatttcgccctcgttgcctccgaggtgctgcagcgtaggcaggggacggcttcgggtggattgacgataagggagctgaatgagttgcttgaccggttggcttccgctgaaaacagggctgagaaaattttggttctttctacccttatccaaaagacaaatgcacaggaaatgaagtggattatcatgataatcctgaaagatctaaagctgggaattagtgaaaaaagcatttttcatgaattccatcctgatgcagaagacttgtttaatgttacttgtgacttaaaattagtatgtgaaaagctaagggatcggaatcaacgtcataagcggcaggatattgaagttggaaaagctgtgcgcccccaattagctaagagagttgctaatgcaactgaagcatggaagaagcttcatgggaaggatgtggttgttgagtgcaaatttgatggtgaccgcattcaaattcataaaaatggaactgaaatacatttcttctcaaggaactttatcgatcattctgaatatgcacatgcgatgtcagaaatcataatacaaaatgttcttgttgataggtgcatccttgatggtgaaatgttggtgtgggacacatccttgaaacgttttgctgagtttggctcaaaccaggaaatagccaaggcagcaagagatggtcttgatagtgatagacagttatgctatgttgcatttgatatcctttattttggagatactagtttgattcaccaaactttgaaggaacgacatgagattttgtgtaaaattgtaaggccagtgaagggtcgtttggaaattttggtacctaatgctggtatcaacagtcatatttcttctggtgaaccttgttggtcatttattgctcataatgtggatgaagttgagagattttttaaagaaaccattgaaaatagagatgagggaattgttttaaaagaccacagctccaaatgggaacctagtgatcgtagtggaaagtggctaaaattgaagcctgaatacattcaagctggctctgatctggacgtacttatcattggtggctactatggctctggacgacgtggaggagaggttgctcaattcttggttggccttgctgagcgtccatccccaaatacgcaccctaagcaatttatctccttttgcagagttggtactggactctctgatgatgagcttgatgctgtagtgaccaaacttaaaccttacttcagaaagtatgaatatccaaagaagaggccaccaagtttttatcaagtaactaatcattcaaaagaaagacctgacgtgtgggttgatagccctgagaaatcaattattctgtctataaccagtgatattcgaactatagaatctgaggtattttctgcaccttacagtctcagatttcctaggattgacagggtgagatatgacaaagcttggtatgaatgccttgatgttcaatcatttatagaactggtacattctagcaacggtaccacacagagggatacagaatatggcagcaaacaggacagtaaaccaaaacgatcgaaatcctccactaggggagaaaagaaaaatttgtccattgttccttctcatttaattcaaactgatgtttccagcattaaggggggctccttaatattttcaaatatgatgttctattttgttaatgtgcctctatctcattctctcgagtccttgcacaaaataattgctgagaatgggggaactttttcaatgaatttgaataactcagtcacgcattgtgttgcagcagacagcaaggggtttaaatttgaagcagcaaagcgtcatggtgatatcattcattattcttgggtattagattgctatgatcaaaagaagcttgtctgcttacagcctaagtacttcctttttctatctgaactgacaaagaagaagttacaagaagaaattgatgagttctcagacacttactacttggaccttgatcttggagtcatcaagcagctcttaagcaatattgataggtcagaagatgtcagcactgttgatcattataggaaaaaatactgcccaaaggataagtggtctttcttttatggatgctccatttatttccactctgcaataccttcattgaaaagtgattggcattttatattgcaacttgctgtgaggagattgaagcttgaagttctcatgggtggtggaaaagttacctctaatcttacttgtgcaacccatttagttgtcttgcttgtgccaggatatcagactgactttgaacaaatacagagtagtttcacttcagtaaaaagaaaaattctccgaagcaagaggttgcatatagttaaatcccagtggttagaagattgttctgacagttgccaaagattaccagaagactcctacagtttgaaaccctggggaatagaagagacaactgctgaagattgtgaactggagttggggttagaggctcatcagagtggagataatgtagaagaccaaaatatttctttctccgacaagggaattcaacagaggagttcaaaagctgcaagtgaagacagtatggctttggtatctcaagagaagggtggcaaaagaaaaagaggaagacctgcaggcagtggtatcaaaaaagtaaaacaaccagctgtcaaacaagctcgaagagcacgaccacaaattgcaaaaaagcctgctaaaatatgtgaatatgaatcgtcagatgaaagtgattctcatggcaaaagaccaattgagcaggagattgacacgagagcaggaagtcttgatttttacaagaaacgttcagaaccacaggagactgagaaacgggaaaatgtccaagttgctgagattgagaaaaattctgaacaaaataagttagacaagcaaaaggacttgaatgacaatgaacgtgaaagaatgttggttcctgaaatagaaatgtctgataggcacaatgagcaaaacaatgaggtgactgagaaattagaaatttcagctgaccccctgcaagcaatgttatttgacatgattcctagccttgccacccaaaaagtcgagcaaccgatgaatcgaagtgttagagaagagaagctaccagaaacctccaatgcagaagcagagcctatgactacaaagaaaaagaaagttagctacaaggatgttgccagtgagctgctgaaggactggtagagcatcgtcttacaaatgtattgctaagttcttaatatataggccagaatttctgtcaaactagttgttaccaaatcttaagtaaagttttaattgtcttagctggcaaatttgatatctgaactttatgtagatcaagaatgaaagcctttaaaaatgataagtgtgaacttatgaaactaaaattatatttaaatctaaatttaagagatgcatttatata

SEQ ID NO: 66 - protein, 1171 aa, Glycine max
MTEQTKLSVLCSLFTWTQRSKSAAKKRAKFRKFLDAFCTDHNFFPAVRLLLPNLDRERGSYGLKESVLATSLIDALGISRDSPDALRLLNWRKGGAATGPTAGNFALVASEVLQRRQGTASGGLTIRELNELLDRLASAENRAEKILVLSTLIQKTNAQEMKWIIMIILKDLKLGISEKSIFHEFHPDAEDLFNVTCDLKLVCEKLRDRNQRHKRQDIEVGKAVRPQLAKRVANATEAWKKLHGKDVVVECKFDGDRIQIHKNGTEIHFFSRNFIDHSEYAHAMSEIIIQNVLVDRCILDGEMLVWDTSLKRFAEFGSNQEIAKAARDGLDSDRQLCYVAFDILYFGDTSLIHQTLKERHEILCKIVRPVKGRLEILVPNAGINSHISSGEPCWSFIAHNVDEVERFFKETIENRDEGIVLKDHSSKWEPSDRSGKWLKLKPEYIQAGSDLDVLIIGGYYGSGRRGGEVAQFLVGLAERPSPNTHPKQFISFCRVGTGLSDDELDAVVTKLKPYFRKYEYPKKRPPSFYQVTNHSKERPDVWVDSPEKSIILSITSDIRTIESEVFSAPYSLRFPRIDRVRYDKAWYECLDVQSFIELVHSSNGTTQRDTEYGSKQDSKPKRSKSSTRGEKKNLSIVPSHLIQTDVSSIKGGSLIFSNMMFYFVNVPLSHSLESLHKIIAENGGTFSMNLNNSVTHCVAADSKGFKFEAAKRHGDIIHYSWVLDCYDQKKLVCLQPKYFLFLSELTKKKLQEEIDEFSDTYYLDLDLGVIKQLLSNIDRSEDVSTVDHYRKKYCPKDKWSFFYGCSIYFHSAIPSLKSDWHFILQLAVRRLKLEVLMGGGKVTSNLTCATHLVVLLVPGYQTDFEQIQSSFTSVKRKILRSKRLHIVKSQWLEDCSDSCQRLPEDSYSLKPWGIEETTAEDCELELGLEAHQSGDNVEDQNISFSDKGIQQRSSKAASEDSMALVSQEKGGKRKRGRPAGSGIKKVKQPAVKQARRARPQIAKKPAKICEYESSDESDSHGKRPIEQEIDTRAGSLDFYKKRSEPQETEKRENVQVAEIEKNSEQNKLDKQKDLNDNERERMLVPEIEMSDRHNEQNNEVTEKLEISADPLQAMLFDMIPSLATQKVEQPMNRSVREEKLPETSNAEAEPMTTKKKKVSYKDVASELLKDW

SEQ ID NO: 67 - DNA, 3759 bp, Solanum tuberosum
tgtaaataaattgattcccagcaaaattctctagtacgcttcaattcaaacgattcgaaattggcaccccaaaacctccaaaagaaaaatggcgacttccgccgtagacggtggtggtaataatagtgttggcggagaagacataaaatttagtgtaatggtcagccttttccagtggatacagaagagtaaatcatcagcgaagaagcggtccaagttccggaagtttattgacaccttctgcaggaagcctcaggacaatttcgctgccattcgccttattctccctggcctcgaccgtgagcgtggctcttatggccttaaggagcacgtcctcgctacttgcctcattgacgcacttgccatgtcccgcgaatccgatgatgcccgccgtcttctcaactggcggaaaggcggtcccaaaactggctcaaatgccggcaacttctctcttgttgccgcggaggtcctccagcgtagacagggaatggcttctgctgggctaacaattaaggaactaaatgacttccttgatcacttggcctcaagtgaaaatagagcagagaagacttcaattctgtctgatctaatcaggaaaacaaatgctcaagaaatgaaatggattataatgataattctcaaagatcttaagttgggaattagtgaaaagagcatcttccatgaattccatccagatgcagaggacttattcaatgtcacatgcgatttaaaattagtttgtgaaaagttgagggacagaagtcaacggcataaacgccaggacattgaagttggaaaacctgtccgccctcagctggctcttagggtcagcaatgcatctgctgcatggaaaaagctttacgggaaagaagtagttgttgagtgtaaatttgatggggatcgcatccagattcacaaaaataattctgagctaaacttcttttcaagaaactttctggatcatcaagagtatgctcatgggatgtcagatgttattactcagaatatccttgctgacaagtgcatactcgatggtgaaatgttggtttgggatgcatcaataaaccgctttgcagagtttggttccaatcaagaaatagcaaaggcagcaagagagggtcttgatagtgataggcagttgtgttatgttgcgttcgatattctttatgttggggataccagtgttattcatcggagcttaaaggaacgtcaagagattctccagaaagttgtgaagcccataaaaggccgtttagaaattttggtccctaatggtggtctgaatgctcatcgtctttctggggagccatgttggtcgatcattgctcgtagtgttgacgatgttgataaattctttaaaggaactgttgagaacagagatgaaggaatagttttgaaagatttaacttcaaaatgggaaccaagtgatcggagtggaaaatggctaaagttgaagcctgattatgttcgacctggctctgatttggatgttcttattatcggaggctactatggttctgggcgacatggaggagaggtagctcaatttctggtgggtcttgctgagcctccggctccaaatacatatcccagaaggttcatttctttttgcagagtgggcactggaatttctgatgaggaacgcaatatcatagtaactcgattaaagccttatttcaggaagtatgagtacccgaagcaggcaccaccaaccttttatcaagtaacaaataatacaaaagagcgtcccgacgtgtgggttgaaagtccagagaaatccatcattgtttcaattacaagtgatattagaacaataagaactgaggtgtttgctgctccatacagtttgagatttccgcgtattgataaagtcagatatgacaagccttggcatgagtgtcttgatgtgcaatcatttgttgatctggtacattcaaccaatggtaccacgcagagggaggacaattatgggattgagcaggatcatgaatcaaaaaccattaggtcgtcaagaaaacgagagaagaagaatgtctctgcagttccttctcattttgttcagactgacgtgtctcgaatcaagggtgaaacatcaatgttctctgacatggtgttttattttgctaatgtgccttcatcacatacacttgaatccttgcacaaaatggtggtcgagcatgggggttctttctccatgaatttgaataagtcagttactcattgtatagcagctgaaagtagaggtatcaagtttcaagctgcaaaacttcatggagatgttattcagtgctcttggctctttgtctgctgtctgcaaaagaagctccttcctttacagccaaagtattttcttttcctttctgattcaacaaagaaaaagatggaagcagaagtggatgaatattctgattctttctactccgacatcagcattgaagaaattaaactgcttttgagaaatatagaacacttagaagactccaaaactgttgagtactacaagaaaaagtactgtcccaaggataaatgggctcgatttcatggttgctgcatttattttttcattccaaagcagtgtctggaatattcagattgcaaggttttagtggaacttgctatgagaaggatgaaagttgaaatttctgtgggtggtgggaaagtttgtgacaatctttttcatgctacccatgtcgtcgtcatgtctctaccagagtttgatgtaaagttcaatgaagtgttgaatagtttctcagaggcagagaaacatgttttgtacaatacaaagctgcatgtagttggagcacggtggttggaggattcctttaaagaggaccagaagttggttgaggagagttatagccttaagcctagcaattttcaaatgtcaatctctgagaagagtagacatgataagctaaaaggtgattccggaaagtgcaacagaccatcttcccctgataaacatggagggcaaatcaaagcagaaggaatttcagaccagggccgagctatcacgctaccaaagaggggaaggaaacgagatagaggaagacctactggtagtgctacagcaaaagggaaagtggggatcaacattccacgtagagttaaacgcaaggtcacaagtagtcgtgctaagattcatgaaaatgaatctgatgaaagtgctacttcaggcgagcatcttcgtaatgacgagagtgaagcggctgttgggagccatgaaagtattgcaatacgtatctcaggaattcagaatgaggatgatgtacaagatctggaattgtcaccagatggtaaagcatttccaccagggactgctgaatgcagtgtgatcggtgaaagattggacgaagcttacgaaacttcatacggaagtggaaatattgccaggggcaaagacaaggtggatgagctggaagaccctgttgatccagtccaagctatgctactgcatatgataccccacttggatagtaagccaacaagaagcgtggacactcttgtaaaagatgacaagccagaggcagatactaatcccagtcctaaaaagaaaaagaaagttagctataaagatgtagctggtgaattgctcaaagattggtgaagccctttatgccatccaccaccttataaggttatgaactttgttttgtttccttctgtatttttattccgcgaccaagtaaatgtaatagttctctttgttgtgtttctggtgtaaatgattcgaacagtttatgcgtctttcttttatta

SEQ ID NO: 68 - protein, 1172 aa, Solanum tuberosum
MATSAVDGGGNNSVGGEDIKFSVMVSLFQWIQKSKSSAKKRSKFRKFIDTFCRKPQDNFAAIRLILPGLDRERGSYGLKEHVLATCLIDALAMSRESDDARRLLNWRKGGPKTGSNAGNFSLVAAEVLQRRQGMASAGLTIKELNDFLDHLASSENRAEKTSILSDLIRKTNAQEMKWIIMIILKDLKLGISEKSIFHEFHPDAEDLFNVTCDLKLVCEKLRDRSQRHKRQDIEVGKPVRPQLALRVSNASAAWKKLYGKEVVVECKFDGDRIQIHKNNSELNFFSRNFLDHQEYAHGMSDVITQNILADKCILDGEMLVWDASINRFAEFGSNQEIAKAAREGLDSDRQLCYVAFDILYVGDTSVIHRSLKERQEILQKVVKPIKGRLEILVPNGGLNAHRLSGEPCWSIIARSVDDVDKFFKGTVENRDEGIVLKDLTSKWEPSDRSGKWLKLKPDYVRPGSDLDVLIIGGYYGSGRHGGEVAQFLVGLAEPPAPNTYPRRFISFCRVGTGISDEERNIIVTRLKPYFRKYEYPKQAPPTFYQVTNNTKERPDVWVESPEKSIIVSITSDIRTIRTEVFAAPYSLRFPRIDKVRYDKPWHECLDVQSFVDLVHSTNGTTQREDNYGIEQDHESKTIRSSRKREKKNVSAVPSHFVQTDVSRIKGETSMFSDMVFYFANVPSSHTLESLHKMVVEHGGSFSMNLNKSVTHCIAAESRGIKFQAAKLHGDVIQCSWLFVCCLQKKLLPLQPKYFLFLSDSTKKKMEAEVDEYSDSFYSDISIEEIKLLLRNIEHLEDSKTVEYYKKKYCPKDKWARFHGCCIYFFIPKQCLEYSDCKVLVELAMRRMKVEISVGGGKVCDNLFHATHVVVMSLPEFDVKFNEVLNSFSEAEKHVLYNTKLHVVGARWLEDSFKEDQKLVEESYSLKPSNFQMSISEKSRHDKLKGDSGKCNRPSSPDKHGGQIKAEGISDQGRAITLPKRGRKRDRGRPTGSATAKGKVGINIPRRVKRKVTSSRAKIHENESDESATSGEHLRNDESEAAVGSHESIAIRISGIQNEDDVQDLELSPDGKAFPPGTAECSVIGERLDEAYETSYGSGNIARGKDKVDELEDPVDPVQAMLLHMIPHLDSKPTRSVDTLVKDDKPEADTNPSPKKKKKVSYKDVAGELLKDW

SEQ ID NO: 69 - DNA, 3803 bp, Solanum lycopersicum
tgaccagaatgtaaataaattgcttcccagcaaaattctctagtacgcttcaattcaaacgattcgaaattggcaccccaaagaaaaaatggcgacttccgccgtagacggtggtggtaatagtagtgttggcggagaagacataaaatttagtgtaatggttagcctttttaagtggatacagaagagtaaatcatcagtgaagaagcggtccaagttccggaagtttatggataccttctgcaggaagcctcaggacaatttcgttgccatgcgccttattctccctggcctcgaccgtgagcgtggctcttatggccttaaggagcacgtcctcgctacttgcctcattgacgcacttgcaatgtcccgcgattccgatgatgcacgccgtctccttaactggcggaaaggcggtcccaaaactggctctaatgccggcaacttctctcttgttgccgctgaggtcctccagcgcagacagggaatggcttctgctgggctaacaattaaggaactaaatgacttccttgatcacttggcctcaagtgaaaatagagcagagaagacttcaattctgtctgatctaatcaggaaaacaaatgctcaagaaatgaaatggattataatgataatcctcaaagatcttaagttgggaattagtgaaaagagcatcttccatgaattccatccagatgcagaggacttattcaatgtcacatgcgatctaaaattagtttgtgaaaagttgagggacagaagtcaacgacataaacgccaggatattgaagttggaaaacctgtccgccctcagctggctcttagggtcagcaatgtatctgctgcatggaaaaagctttacgggaaagaagtagttgttgagtgcaaatttgatggggatcgcatccagattcacaaaaataattctgagctaaacttcttttcaagaaactttctggatcatcaagagtatgctcatgggatgtcagatgttattactcagaatatcctcgctgacaagtgcatactcgatggtgaaatgttggtttgggatgcatcaataaaccgctttgcagagttcggttccaatcaagaaatagcaaaggcagcaagagagggtcttgatagtgataggcagttgtgttatgttgcgttcgatattctttatgttggggataccagtgttattcatcggagcttgaaggaacgtcaagagattctccagaaagttgtgaagcccataaaaggccgtttagaaattttggtccctaatggcggtcttaatgctcatcgtctttctggggagccctgttggtcgatcattgctcatagtgttgacgatgtcgataaattctttaaaggaactgttgagaatagagacgaaggaatagttttgaaagatttaacttcaaaatgggaaccaagtgatcggagtggaaaatggctaaagttgaagcctgattatgttcgacctggctctgatttggatgttcttattatcggaggctactatggttctgggcgacatggaggagaggtagctcaatttctggtgggtcttgctgagcctccggctccaaatacatatcccagaaggttcatttctttttgcagagtaggcactggagtttctgatgaggaacgcaataccatagtaactcgattaaaaccttatttcaggaagtatgagtacccgaagcaggcaccaccaaccttttatcaagtaacaaataattcaaaagagcgacccgacgtgtgggttgaaagtccagagaaatccatcattgtttcaattacaagtgatattagaacaacaagaactgaggtgtttgctgctccatacagcttgagatttccgcgtattgataaagtcagatatgacaagccttggcatgagtgtcttgatgtgcaatcatttgttgatctggtacattcaaccaatggtaccacgcagagggaggacaattatggggttgagcaggatcatgaatcaaagaccattaggtcgtcaagaaaacgagagaagaagaatgtctttgcagttccttctcattttgttcagactgacgtgtctcgaattaagggtgaaacatcaatgttctctgacatggtgttttattttgctaatgtgccttcatcacatacactagaatccttgcataaaatggttgttgagcatgggggtgctttctccatgaatttgaataagtcagttactcattgtatagcagctgaaagtagaggtatcaagtttcaagctgcaaaacttcatggagatgttattcaatgctcttggctctttgactgctgtctgcaaaagaagctccttcctttacagccaaagtattttcttttcctttctgattcaacaaagaaaaagatggaagcagaagtggatgaatattctgattctttcttctccgacatcagcattgaagaaattaaactgcttttgagaaatatagaacacccagaagactccaaaactgtcgagtactacaagaaaaagtactgtcccaaggatgaatgggctcggtttcatggttgctgcatttattttttcataccaaagcagtgtctggaatattcagattgcaaggttttagtggaacttgctatgaagaggatgaaagttgaaatttctgttggtggtgggaaagttggtgacaatctttttcatgccacccatgtcgtcgtcatgtctctaccagagatcgatgtaaagttcaatgaagtgttaaatagtttctcagaggctgagaaacatgttttgtacaatacaaagctgcatgtagtcggagcacggtggttggaggattcccttaaagaggaccagaagttgcttgaggagagttatagccttaagcctagcaattttcaaatgtcaatctctgagaagagtaggcatgataagcaaaaaggtgattctgaaaagtgcaaaagaccatcttcccttgataaacatggaggacaaatcaaagcaaaaggaatttcagaccagggccgagctatcacactaccaaagaggggcaggaaacgagatagaggaagacctactggtagtgctacagcaaaagggaaagtggggatcaacattccacgtacagttaaacgcaaggtcacaagtagtcgtgctaagattcatgaaaatgaatctgatgaaagtgctacttcatgtgagcatcttcgtaatgacgagggtgaagcggctgttgggagctatgaaactactgcagtacgtagctcaggagttcagaatgaggatgtacaggatctggaattgtcagaagatggtaaaacacttccaccagggactgctgaatgcagtgtgatcaatgaaagattggacaaagctcacgaaacttcatatggaagtggaaatattgccaggggcaaagacaaggtggatgaaaagctggaagaccctgttgatccagtccaagctatgctattgcatatgataccccacttggatagtaagccaacaagaagcatagacactcttgtaaaagacgacaagccagatgcagatactaatcccagtcctaaaaagaaaaagaaaattagctataaagatgtagctggtgagttgctcaaagattggtgaaaccctttatgccatccaccactttataaggttatgaactttgttttgtttccttctgtatttttattctgcgaccaggtaaatgtaatagtctcttgtgtgttgtgtttctggtgtaaataaatttgttttgtttccttctgtattaaattgtttggtgttttatcagttatggttattgtcgcacccgttaaaa

SEQ ID NO: 70 - protein, 1172 aa, Solanum lycopersicum
MATSAVDGGGNSSVGGEDIKFSVMVSLFKWIQKSKSSVKKRSKFRKFMDTFCRKPQDNFVAMRLILPGLDRERGSYGLKEHVLATCLIDALAMSRDSDDARRLLNWRKGGPKTGSNAGNFSLVAAEVLQRRQGMASAGLTIKELNDFLDHLASSENRAEKTSILSDLIRKTNAQEMKWIIMIILKDLKLGISEKSIFHEFHPDAEDLFNVTCDLKLVCEKLRDRSQRHKRQDIEVGKPVRPQLALRVSNVSAAWKKLYGKEVVVECKFDGDRIQIHKNNSELNFFSRNFLDHQEYAHGMSDVITQNILADKCILDGEMLVWDASINRFAEFGSNQEIAKAAREGLDSDRQLCYVAFDILYVGDTSVIHRSLKERQEILQKVVKPIKGRLEILVPNGGLNAHRLSGEPCWSIIAHSVDDVDKFFKGTVENRDEGIVLKDLTSKWEPSDRSGKWLKLKPDYVRPGSDLDVLIIGGYYGSGRHGGEVAQFLVGLAEPPAPNTYPRRFISFCRVGTGVSDEERNTIVTRLKPYFRKYEYPKQAPPTFYQVTNNSKERPDVWVESPEKSIIVSITSDIRTTRTEVFAAPYSLRFPRIDKVRYDKPWHECLDVQSFVDLVHSTNGTTQREDNYGVEQDHESKTIRSSRKREKKNVFAVPSHFVQTDVSRIKGETSMFSDMVFYFANVPSSHTLESLHKMVVEHGGAFSMNLNKSVTHCIAAESRGIKFQAAKLHGDVIQCSWLFDCCLQKKLLPLQPKYFLFLSDSTKKKMEAEVDEYSDSFFSDISIEEIKLLLRNIEHPEDSKTVEYYKKKYCPKDEWARFHGCCIYFFIPKQCLEYSDCKVLVELAMKRMKVEISVGGGKVGDNLFHATHVVVMSLPEIDVKFNEVLNSFSEAEKHVLYNTKLHVVGARWLEDSLKEDQKLLEESYSLKPSNFQMSISEKSRHDKQKGDSEKCKRPSSLDKHGGQIKAKGISDQGRAITLPKRGRKRDRGRPTGSATAKGKVGINIPRTVKRKVTSSRAKIHENESDESATSCEHLRNDEGEAAVGSYETTAVRSSGVQNEDVQDLELSEDGKTLPPGTAECSVINERLDKAHETSYGSGNIARGKDKVDEKLEDPVDPVQAMLLHMIPHLDSKPTRSIDTLVKDDKPDADTNPSPKKKKKISYKDVAGELLKDW

SEQ ID NO: 71 - DNA, 4139 bp, Sorghum bicolor
ctcttggtctcccaagtgcctcttcgatcctcgtctcgtcgaactcgagcacgcagccggcaggcggccggagagagcgccggagccagagaagccagcggccagggtattccggggaggcgagggagcgcgtgggggtaacagatacgagaagtgagttgggagaccctcgctcccctaccccaccgccgacaatggcggcgaaggtgcggttcagcctcctggtggcgatgttccaggccatgtcgggcgacaagagttcggcgaagaagcgcagccgcctgcgcgcgttcctcgaccgcgcctacgtgcccagcggcggtagggatgactatttcagcgcgctccgcctcgtgctcccggggctcgaccgcgagcgcggcacctacgggctcaaggaggccaccctcgctgccgtgcttgtcgacgcccttggcatcgccaaggactctgccgacgccgtccggctcaccaactggcgccgcggcgggggtttccgcaacgccggcaacttcgggcttgtggccgctgaggtcctgcaacggaggcagggtttaacttctggtggattgacgataaaggaggttaacgatgcacttgatcgtctagctgcaactgagaacaggtccgagaaggcctcaatactttctaatctgatcaagaaaaccaatgccgctgaaatgaagtggcttctgatgattattcttaaagatttgaaattggggataagtgagaagagcatatttgaagaatttcatcctgatgcccaagatttgttcaatgtcacctgtgacttgaaatttgtctgcgagaagctcaatgatcgaagccagaggcataaacgtcaggatatagaaattgggaaggctgttaggcctcagctagctatgagagtccgtgatgcttcagctgcttggaagaagcttcatggaaaacaagtggttgctgagtgcaaattcgatggtgaccgtattcaaatccacaaaaacggggaagagatccatttcttctctaggagctttcttgatcactctgaatacacacatgggatgtcaaatattattaaagaaaatatcctggttgacagatgtatattggatggagaaatgcttgtctgggacactgtacttaaccgttttgctgaatttggttcaaaccaggaaatagctaaggctgcaagggagggattggagactgatcgacagttgtgctatgttgcttttgacatcctttatgctggagacaccagtgttatccaccaaagtttgacggagcggcatcaaattctgcagaaggttgtgaaaccattaaagggtcatcttgagattttaatcccaacaggtggtttaaatgttcgtcgcccttcagatgaaccatgctggtcgattattgcacacaatgttgaagatgttgaaagattcttcaaagagactattgagaacagagatgagggcattatactgaaggaccttgattccaaatgggaacctggtgaccgaaatggaaagtggcttaaactaaagcctgattatatacatgcgggtgccgatctggatgttattattatagggggatactatggatctggacgtcgaggacgagaggttgcacagtttttagttggccttgcagtcccttcagatgataatagttatcccaaaaggtttctttcattttgccgtgtcggtactggcctctctgatgaagagcgtgatgctcttgtcaccaaactgaagccttatttcaggaaaaacgagtacccgaaaaaaccaccaaaattttatgaagttacaaataactcaaaggagaggccagatgtttggatcgagagccctgataagtcagtcataatatctgtaacaagtgacattcgtacaatcaagtccgaggtatttgcttctccatactgtttgaggttcccccgtattcagagagtgagatatgacaagccatggcatgagtgccttgatgtgcaggcatttgtggacattgtgcattcaagtaatggtacaacacaaagggtggcagatgataacagcctgaagaatgatgacacgaatcgctcaagaacaaacaaaaaagtggagaagaagaagtgtgtctcagtcatcccttcacatctcatgaagactgatgtatcaggtcttaagggagaaaccctgatatttgccaacatgattttctattttgtcaacattccatcatcttataatctcgaatattttcataaactagttgtggaaaatgggggatctttctccatgaatctgaatgactctgttacgcactgcatagctgcggagaagaaaggtatcaaatatcaggcagctttacggcagggaaggatcattcactatgagtggatattagattgttgtaaggaaaaacatcttcttcgtttgcaacctaggtatatactatttcttgctgattttgccaggcacaaatttcctgaagagattgattcatatgctgactattactactgggacattgaaattgctgacctcaagcagattttcagcaacatcgacaaagttgctggtgattcaaacatggttaatcagtacaaaaagaagcattgcatagatgagagattctgtttcttccagggttgctgtgtctacttgcataatgcacccttagtgaatgcggactacaatgtaatatctgatcttgcgctgaagagggtgaagcaggatctaacaatgcatggtggtcaagtctgcagcagcattgctccagctactcatttggttgtagtttcggttttacaggcctataactttgataacctgtacaagagcttccctcctgctgaaagacgttatctgcatgacaaacgattacatgttgtcagtaataagtggttggaagattcagttgagaaacaaatgaagctctctgaaactgcttacagccttaaaccagatacactagaagaactagaaattgaaaggagtgaggaaaatgttcagcctccggatcataagcttgaggaacacagggaagttgaaagatctcatgcgaaaaatgtaccaaggaaaaggaccaggccaaccagttcaagaactgcaagggctgctcctagaccagtccggcgaatgaggcctagaagaggaaaccagaaagcaaaaataggtgatgatgttgaatctgaagaaagtggccccagcgaatgtcaagatgatcaaaatttggacacagatgatacctctaagattgaagaaggtattaccagcaaaaagaaaggactccctccacctgcttctaaaccagcccggagaacaagggctgccagaggaaatcagcatacaaagatagacgatggcggatctgaagaaagcgggccttgtgaaacagggcaagatgatcagaagttggacacagattacatctctaatatggaagttgataacagtgataaagactgtggaccaccgcctggtgctcagcttttcacattgggggagcaagaggccaaaggtgtcaaattgaacaccgtggaagagaaaccagacagtcctttccaaagaacaactgctgctgaagcgatgagtagtgcgcctggtgacaagatagaacaaatggctgatccattgcacgccatgcttctggatatgttgccactcctgggcaagaaagggacagaagatgcaagtagggcacccttgccgaaagctgagaaggatccacctgcaggaggaagttccacatccaattctgagattctggcgccagatgctggtacatccggggttccagccccagacccgaatgcagctcctcccccgaagaagaaaaaagtgagttacaaagatgtcgctagtgaacttctgaaagattggtgagagagcttggtcagtgaacttctgaaaaaagtgagttacacttttactcccgtagtcgttatcatgtaaatacaacgccatgtaagtaaccatgtttgtagcgtcaccttgactgtttgtcttgttctcagaagttcactagctttgcctggtgacttgttgagaatgactcttaagcctagcaacactgatgttgagttggaccaatatgcatgcggaatccaaggattttacacgcattttgtattatattgcattgaagtggaagtggaagcctgtggtctgctc

SEQ ID NO: 72 - protein, 1218 aa, Sorghum bicolor
MAAKVRFSLLVAMFQAMSGDKSSAKKRSRLRAFLDRAYVPSGGRDDYFSALRLVLPGLDRERGTYGLKEATLAAVLVDALGIAKDSADAVRLTNWRRGGGFRNAGNFGLVAAEVLQRRQGLTSGGLTIKEVNDALDRLAATENRSEKASILSNLIKKTNAAEMKWLLMIILKDLKLGISEKSIFEEFHPDAQDLFNVTCDLKFVCEKLNDRSQRHKRQDIEIGKAVRPQLAMRVRDASAAWKKLHGKQVVAECKFDGDRIQIHKNGEEIHFFSRSFLDHSEYTHGMSNIIKENILVDRCILDGEMLVWDTVLNRFAEFGSNQEIAKAAREGLETDRQLCYVAFDILYAGDTSVIHQSLTERHQILQKVVKPLKGHLEILIPTGGLNVRRPSDEPCWSIIAHNVEDVERFFKETIENRDEGIILKDLDSKWEPGDRNGKWLKLKPDYIHAGADLDVIIIGGYYGSGRRGREVAQFLVGLAVPSDDNSYPKRFLSFCRVGTGLSDEERDALVTKLKPYFRKNEYPKKPPKFYEVTNNSKERPDVWIESPDKSVIISVTSDIRTIKSEVFASPYCLRFPRIQRVRYDKPWHECLDVQAFVDIVHSSNGTTQRVADDNSLKNDDTNRSRTNKKVEKKKCVSVIPSHLMKTDVSGLKGETLIFANMIFYFVNIPSSYNLEYFHKLVVENGGSFSMNLNDSVTHCIAAEKKGIKYQAALRQGRIIHYEWILDCCKEKHLLRLQPRYILFLADFARHKFPEEIDSYADYYYWDIEIADLKQIFSNIDKVAGDSNMVNQYKKKHCIDERFCFFQGCCVYLHNAPLVNADYNVISDLALKRVKQDLTMHGGQVCSSIAPATHLVVVSVLQAYNFDNLYKSFPPAERRYLHDKRLHVVSNKWLEDSVEKQMKLSETAYSLKPDTLEELEIERSEENVQPPDHKLEEHREVERSHAKNVPRKRTRPTSSRTARAAPRPVRRMRPRRGNQKAKIGDDVESEESGPSECQDDQNLDTDDTSKIEEGITSKKKGLPPPASKPARRTRAARGNQHTKIDDGGSEESGPCETGQDDQKLDTDYISNMEVDNSDKDCGPPPGAQLFTLGEQEAKGVKLNTVEEKPDSPFQRTTAAEAMSSAPGDKIEQMADPLHAMLLDMLPLLGKKGTEDASRAPLPKAEKDPPAGGSSTSNSEILAPDAGTSGVPAPDPNAAPPPKKKKVSYKDVASELLKDW

SEQ ID NO: 73 - DNA, 2423 bp, Beta vulgaris
ttagaaagtagctttggcggtcttccacaaacttcattcttcccgtagtttaatactattcacctccctcaaaactcaaaattcactttctttctgggtttaaattcttctctgagttttgaagttgaagtgcagcagctaattcagtcaatacttgatcatggagatagacccagatgatattttccgcgacgatgatgacgattctcactctaataaccttcaggagagagagtcgagcaaggagtatgcggtgtacattgttgatgcttcccccaaaatgttcaatactacttgccctggtgaagatcaaactgttcagtctcattttcaaatggctattagctgtatctccgagtccttgaagaatcgtattattaatagctcgtatgacgagattgcaatatgctttttcaacactcgagaaaagaagaatttgcaggatctgaatggcgtttttgtattcagtgttgctgtggaagatggtctggacaggccaacagccaggctaataaaagaatttgatcaaattgaggaatcgttcatgaaaaagattggaagccagtatggaattgtgtctggatcgcgggagaattctctctacaatgccctttgggttgctcaagcactgctacgcaaaggatctgcaaagatggttgacaagcgtatgcttatgtttacaaatgaggatgatccatttgggacattgaagggagtaacaaagctagacatgacaagaactacgttgcaacgagctaaagatgcacaagatcttggtatctctatcgaactccttcctctgagtagtcctgatagggagttcaacatgtcccttttctttgctgacatgcttggattggagggtgatgctctagctgattttgttccctcatcaatagcgagattgcaagacatgaaagaccagctgagaaaacgtatgttcaagaaacgcagatatagaacatataatttgtcaattgcaaatggtgtatctatacaaatgagtgcatatgctctacttcgtcctactgtcccaggaaatatcacttggctggattctacgaccaatcttcctctcaagacagaaaggtccttaatatgtgctgataccggtgcacttatgcaagaagctcccaagcagtttatatcttacagggatcgggaaaccaagttttccatggaggagatatcacagataaaaagagtctctataacacaactttgtcttctcggattcaagccattgaattgcttgaaggattatcataatctgaagccatcaacgtttttgtttcctactgatgaggaaatgattggaagcacaaagatcttcgttgctttgcatagatctatgttgcggcttagacgctttgcagttgcattttttggaagttcaacacatcctcagttggttgcactcattgctcaagatgagataattagtgctggtggtcagattgagcctcctggaatgcatatgatttacctaccatattgtgatgatataagaaacactgaagagcttcatatggatgctactttcacaacccctcgggcatctgacgaagaaattaagaaggctaccacccttctgaaacgtgtagatttgagagatttttcagtatgccaattttctaatcctgctttgcagaagcactatgcagtactacaggccttggctctggaagaagatgaaataccagaaatcagggatgaaacccttccagatgaagaaggcatggctaggcctggtattgttaatgcagtagaagagttcaagctgtctgtctatggggaaaactatgaagaaggaggagagagtaatgttacagaagcttctagaaaacgcaaagctattgctgataaggcagtcgaacagtctgctaattatgactgggaaaaccttgctgatagtggaaagttgaaagatttgacagtggcagagctgaaatactacctaacagcacataagcttcctgttactggaaagaaggaagctcttatcagtaggattttgactcacatgaataaataaaattagccttcatagatttattgtgcggagaagaaggattctgattctatctggagatgtacaaacggagtgaagaatcttaaaataccggtgtcatcggccttttaccatgaccggaaggtatttattgatttagttcatcttccgactctaatatgtgtaacattttggtgatcatcttgcacactttttggtgatgtaggccagtatctcatggtgtaatcctttgtgttaaacgtgctagtggtttgatattgtacaggataaacatatttttttctttctagatcaattaggttgagagaagacttttataactagtactttttttttttctcactaacatatttgcttagtatgatgagctccaaattaaaacctgtcttca

SEQ ID NO: 74 - protein, 624 aa, Beta vulgaris
MEIDPDDIFRDDDDDSHSNNLQERESSKEYAVYIVDASPKMFNTTCPGEDQTVQSHFQMAISCISESLKNRIINSSYDEIAICFFNTREKKNLQDLNGVFVFSVAVEDGLDRPTARLIKEFDQIEESFMKKIGSQYGIVSGSRENSLYNALWVAQALLRKGSAKMVDKRMLMFTNEDDPFGTLKGVTKLDMTRTTLQRAKDAQDLGISIELLPLSSPDREFNMSLFFADMLGLEGDALADFVPSSIARLQDMKDQLRKRMFKKRRYRTYNLSIANGVSIQMSAYALLRPTVPGNITWLDSTTNLPLKTERSLICADTGALMQEAPKQFISYRDRETKFSMEEISQIKRVSITQLCLLGFKPLNCLKDYHNLKPSTFLFPTDEEMIGSTKIFVALHRSMLRLRRFAVAFFGSSTHPQLVALIAQDEIISAGGQIEPPGMHMIYLPYCDDIRNTEELHMDATFTTPRASDEEIKKATTLLKRVDLRDFSVCQFSNPALQKHYAVLQALALEEDEIPEIRDETLPDEEGMARPGIVNAVEEFKLSVYGENYEEGGESNVTEASRKRKAIADKAVEQSANYDWENLADSGKLKDLTVAELKYYLTAHKLPVTGKKEALISRILTHMNK

SEQ ID NO: 75 - DNA, 2326 bp, Zea mays
tttctagaaccttcccacgccctgcgcccctttgctgtctcatacctgtcttaaaccctagctagtttctaggaccttcccacgccctgcgcccctttgctgtctcaaacctaccttaaacccttgttagtttctagaaccttccagacctccagttcccgacctcggcgccatggacctggacccagaggggatcttccgcgacgacagcgatgaagacgaagacagtgtccaggagagggaggcgaacaaggagatggttgtctaccttgtcgacgcctcgcccaaaatgttcacccctgccaccacccaggacaatgaaaagcaggagacacatttccataccattgttaactgcatcacagagtctctgaagacacaaattattggtagatcttatgatgaagtcgcaatatgtttctttaacactaaagagaagaagaatttacaggactcagccggtgtttatgtttataatgtcggagacagagagcaacttgatagacctactgcaaaactcatcaaggatttttctttgatagaagattcttttatgagcaccattggaagtcgatatggaataacagctggatctcgggagaataccctgtataatgctctttgggttgctcaggcgctgttgcgcaagggatctgtgaagaccgtgagtaaacgaattcttatattcaccaatgaagatgatccttttggtactattacaggagcagtgaaaactgatatgattaggacaacacttcaacgtgcaaaggatgcacaagatcttggcctgtctattgaacttcttccactgagcccgcctgatgaccagttcaacatgtccctgttttatgcagatttgattggtctggatggagatgagatgaccgaatatttgccatctgctggtgataagctagaggatatgactaatcaactgagaaaacggataatgaagaagcgcagaatcaaaactctttcatttgcgattaccaatgatgtgtgcatagaagtcaatacatatgcgctggtccgtcctactactacagggacaatcacatggcttgattcactaagtaacctcccattaaaggttgagaggtctttcatatgcaatgatactggggctctacttcaggatgcacagacacgtttccagatgtacaatgacacaattgtcaaattttctgtacgtgaactctctgaggttaaaagggttgcaagccatcatcttcgccttataggtttcaagccattggattgcttgaaagattaccataacttaagaccatcgacatttatttatccgagtgatgagcgtatatttggaagcacctgtgttttcgttgctttacatagctcaatgttacgtcttggaaggtttgcacttgcattttatgggaatccaactcgaccacaactcatagcccttgttgctcaagaagaggttacttcgtctggtcgtcagtttgaaccgcctggcatgcacatgatctatcttccatactccgatgatattagatatcctgaagaagttcatgtgacttctgatgatgcaccgcgtgcaacagatgaacaaatcaagaaagcttcgaacatattcaaacgtattgatctgataaatttctctgcatgccaatttgctaacccagctttgcaaagacactatgggatcttggaggccttagctttaggcgaagatgagatgcctgatataaaggatgagaccctgcctgacgaagaaggcttgtctaagccaggggtagccaatgctattgaggaattcaagacttcagtctatggtgaaaattatgaccaagaggaggcagaagcggcagcagggaaagcttcccgtggtaatgcttcaaaaaagcggaaggaggtcactgatgcagctgcgcagataagtgctgcttatgattgggcagaacttgcagacaatggaaaactgaaggaaatgaccacggtggaattgagatcctacctgaccgcgcatgatctcccggtttctggtaagaaagatgtacttatcagcaggatcttgactcacctgggtaagtgaagccgggtatccgaactgttagtttcctgagacccgactgacatctgtagtgctgtctcgcggatccttgtggaccgtaatcctcccccgtgcaggctacgtgccgattttttgtatagcgacaggacagcaccagttgccaatgtaacctgtgttaagtttcgtcttgtggtatcatctgcttgtcattgtcaacatgaaacataatgtaattctggatacttagacccacaatatggagcataactgcataaggtatgttaaagc

SEQ ID NO: 76 - protein, 628 aa, Zea mays
MDLDPEGIFRDDSDEDEDSVQEREANKEMVVYLVDASPKMFTPATTQDNEKQETHFHTIVNCITESLKTQIIGRSYDEVAICFFNTKEKKNLQDSAGVYVYNVGDREQLDRPTAKLIKDFSLIEDSFMSTIGSRYGITAGSRENTLYNALWVAQALLRKGSVKTVSKRILIFTNEDDPFGTITGAVKTDMIRTTLQRAKDAQDLGLSIELLPLSPPDDQFNMSLFYADLIGLDGDEMTEYLPSAGDKLEDMTNQLRKRIMKKRRIKTLSFAITNDVCIEVNTYALVRPTTTGTITWLDSLSNLPLKVERSFICNDTGALLQDAQTRFQMYNDTIVKFSVRELSEVKRVASHHLRLIGFKPLDCLKDYHNLRPSTFIYPSDERIFGSTCVFVALHSSMLRLGRFALAFYGNPTRPQLIALVAQEEVTSSGRQFEPPGMHMIYLPYSDDIRYPEEVHVTSDDAPRATDEQIKKASNIFKRIDLINFSACQFANPALQRHYGILEALALGEDEMPDIKDETLPDEEGLSKPGVANAIEEFKTSVYGENYDQEEAEAAAGKASRGNASKKRKEVTDAAAQISAAYDWAELADNGKLKEMTTVELRSYLTAHDLPVSGKKDVLISRILTHLGK

SEQ ID NO: 77 - DNA, 2140 bp, Brassica napus
gttctttgctaaaacctctacgaacattttgcatcgaggaggtcaacaacagccattactcctgtgatttcattcttgtgagagaagatggaacttgacccagaagatgttttcagagatgaagacgaagacccagaaagccagttcttccaggaaagagaagcttccaaagagtttgtagtctatctaatcgacgcttctcccaaaatgttcagctatacttgcccctctgaggatgagaaacaagaaagccattttcacatttctgttagttgcattgctcagtcactcaagtctcatatcatcaaccgttctaacgatgaaattgcaatatgcttctttaacactcgtgaaaagaagaatcttcaagacctgaatggtgtttatgtctttaatgttccacaaagagagtgtattgaccgtccaacagcgaggctgattaaagactttgatctcattgaagaatcattcatagaagatattggcagtcaaaatggtatagtctcagattctcgggagaattctctttatagtgctctctgggttgcacaagcactactgcgcaaaggatcttcaaagacggcagataagcgcatatttctattcaccaatgaagatgatccttttgggagtatgaggatttctgttaaagaagatatgacaaggactacattgcagagggctaaggatgcgcaagaccttggcatctcaatcgagcttcttcccctcagtcaccctgataagcaattcgatatctctctcttctacaaggaattaattggattaaatggtgatgagcttacagagttcatgccatcagttggacagaagctagaggacatgaaggatcaactgaagaagcgtgtacttgccaagagaatagcaaagagaattacatttatgatatgtgatggtgtttctattgaactgaatggttatgctttactccgtcctgctactcctggaaccataacctggcttgactctactactaatcttccgataaaggtggaaagatcatatgtttgtgcggacactggagcgataatgcaagaacctattcaacggattcagccttacataaatcgggatgtcatgtttacagcggcagagctatccgaactaaaaaagatatcaactggacatttaagactgctggggttcaagcctcttagttgcctcaaagattatcacaacatgaagccttctacctttctctatccaagtgataaggaagttattgggagcactcgtgcattcattgccttgcatagatccatgatacagcttggacgttttgctgttgccttttatggtggtacgacacctcctagattggttgcccttgttgctcaggatgaaatcgagagtgatggtggtcaggtggagccaccagggatgaatatgatataccttccatatgctaatgatattagagatatcgaagagttgcattcaaaaccaggtgtagctgctcctcgagcaacagaagatcagcttaaaaaggcatcagctctaatgcgacgtttagagttaaaggacttttctgtttgccaatttgctaatcccgctttacagagacactacgcgatgttgcaagccattgcattggatgaagacgagcttggagaaacaagagatgagactcttcctgacgaaggaggaatgaacagacctggagttgtaaaagcaatagaagaattcaaggagtctatttacggtgatgactctgaggaagaaagtgactccggggcaaaggagaaatcaagaaagcgaaaagctgcagatgcaggagactatgactttgtagagcttgcaaaaaccgggaagctcaaggacttgacggtggtcgagctgaagacttatttgactgccaacaatcttcccctcagcgggaagaaagatgctctcatcaataggattctggctcacgttagtaaataaccttaaccgtgatttgtaactccagctagagaaattacgtttttaatttcatgtattataaagcttgtcggcttttgatgagaaccgaatctggttaacttccggtttattgttcaacgttttggctcactcacattttggatttttattgtaatggttaacaacttaacataaacaagtatcgtctcttcttgcc

SEQ ID NO: 78 - protein, 618 aa, Brassica napus
MELDPEDVFRDEDEDPESQFFQEREASKEFVVYLIDASPKMFSYTCPSEDEKQESHFHISVSCIAQSLKSHIINRSNDEIAICFFNTREKKNLQDLNGVYVFNVPQRECIDRPTARLIKDFDLIEESFIEDIGSQNGIVSDSRENSLYSALWVAQALLRKGSSKTADKRIFLFTNEDDPFGSMRISVKEDMTRTTLQRAKDAQDLGISIELLPLSHPDKQFDISLFYKELIGLNGDELTEFMPSVGQKLEDMKDQLKKRVLAKRIAKRITFMICDGVSIELNGYALLRPATPGTITWLDSTTNLPIKVERSYVCADTGAIMQEPIQRIQPYINRDVMFTAAELSELKKISTGHLRLLGFKPLSCLKDYHNMKPSTFLYPSDKEVIGSTRAFIALHRSMIQLGRFAVAFYGGTTPPRLVALVAQDEIESDGGQVEPPGMNMIYLPYANDIRDIEELHSKPGVAAPRATEDQLKKASALMRRLELKDFSVCQFANPALQRHYAMLQAIALDEDELGETRDETLPDEGGMNRPGVVKAIEEFKESIYGDDSEEESDSGAKEKSRKRKAADAGDYDFVELAKTGKLKDLTVVELKTYLTANNLPLSGKKDALINRILAHVSK

SEQ ID NO: 79 - DNA, 1900 bp, Hordeum vulgare
atggacctggaccccgagggcatcttccgcgacgacagcgacgaggacgacgacaacctccatgagagggaggccaacaaggagatggtcgtctacctcatagacgcctcgcccaagatgttcacgcccgccaacgccgccaaggcagatgaaaagcaggagacacatttccataccatagtgaactgcatcacgcagtctctgaagacgcagattatcgggagatcccgtgatgaagttgcaatatgtttctttaacaccaaagaaaagaaaaatttacaggagctggctggtgtatatgtttacaatgtcacagaaagagagcaacttgataggcctgatgcaagactgattaaagaattttcttgtgtagaagattcttttatgaataacattggaagccggtatggaataacctctggatctcgagagaataccctgtacaatgctctttgggttgcacaggcactgctgcgcaaaggatctgtgaagactgtgagtaagagaatcctcatattcaccaatgaggatgatccttttggtggtattacaggagcagcaaaggctgatatgataaggaccacaattcaacgtgcaaaagatgcaaaagatctgggcctgtctatcgaacttcttccattgagtaggcccgatgaggacttcaacatgtccctgttttacgcagagttgattggtctggagggagatgaagtactgcagtacgtgccatctgctggtgaaaagctggaggatatgactgatcaactgagaaagcgaatgatgaagaagcgcaaagtcaaaactctctcatttgcaattacaaatgatgtttgcatagaggtgaacacatatgcgctaatccgtccaactgctccagggacgattacgtggcttgactcgatcagtaaccttccattaaagactgaaaggtctttcatatgcaatgacaccggggcccttcttcaggctccccaagagcgctttcagctatacaatgataaagctgttaaattttctgttcgtgaattgtctgatgtgaagagggtttcaagtcttcatttagggttcaagccattggattgcttgaaagattatcataatttaagtccatcaacatttatttaccccagtgatgagcaaatattcggaagcactcgtgttttcgttgctttacatagctcgatgctgcgccttggacggtttgcacttgcgttttacgggacccctactcgcccacggcttgtagcccttgttgcacaagaagaggttatttcttcgagtggtcaagatgagccacctggaatgcacatgatctatcttccatactcggatgatgttagatatcctgaagaggttcatctgacttctggggatgcacctcgtgctacagatgagcaaataaagaaagcttcgaatctgttgaaacgtattgacctgaagcatttctcagtatgccgatttgctaacccaggattgcaaaaacactacgggattttggaagccttagctttaggtgaggatgagatgccggatataaaggatgagaccctgcccgatgaagagggcatggctaggccaggagtagttaaagctatagaagaatttaaggctgcagtgtttggtgaaaattatgaccaagaggaagccgaggcagcggcagcaaaaggtggtgcctcaaagaagaggaaagcaattgctgatgcagcttcacagaaaagcgcagcttatgattgggcagaccttgcagacaatggaaagctgaaggacatgacggtgatggacttgaaaacttacctgacggcgcatggtctcccggtttctggcaagaaagacgccatcatcagcaggatcttgactcatctaggcaagtgagaaacaagaatcgttgactgggaatatg

SEQ ID NO: 80 - protein, 623 aa, Hordeum vulgare
MDLDPEGIFRDDSDEDDDNLHEREANKEMVVYLIDASPKMFTPANAAKADEKQETHFHTIVNCITQSLKTQIIGRSRDEVAICFFNTKEKKNLQELAGVYVYNVTEREQLDRPDARLIKEFSCVEDSFMNNIGSRYGITSGSRENTLYNALWVAQALLRKGSVKTVSKRILIFTNEDDPFGGITGAAKADMIRTTIQRAKDAKDLGLSIELLPLSRPDEDFNMSLFYAELIGLEGDEVLQYVPSAGEKLEDMTDQLRKRMMKKRKVKTLSFAITNDVCIEVNTYALIRPTAPGTITWLDSISNLPLKTERSFICNDTGALLQAPQERFQLYNDKAVKFSVRELSDVKRVSSLHLGFKPLDCLKDYHNLSPSTFIYPSDEQIFGSTRVFVALHSSMLRLGRFALAFYGTPTRPRLVALVAQEEVISSSGQDEPPGMHMIYLPYSDDVRYPEEVHLTSGDAPRATDEQIKKASNLLKRIDLKHFSVCRFANPGLQKHYGILEALALGEDEMPDIKDETLPDEEGMARPGVVKAIEEFKAAVFGENYDQEEAEAAAAKGGASKKRKAIADAASQKSAAYDWADLADNGKLKDMTVMDLKTYLTAHGLPVSGKKDAIISRILTHLGK

SEQ ID NO: 81 - DNA, 2029 bp, Triticum aestivum
ttccccacgcacccccttcttccccgcgcgagtgctagttccggtcggcgccatggacctggaccccgagggcatcttccgcgacgacagcgacgaggacgacgacaacctccatgagagggaggccaacaaggagatggtcgtctacctcatagacgcctcgcccaagatgttcacacccgccaacgccgccaagccagatgaaatgcaggagacacatttccataccatagtgaactgcatcacgcagtctctgaagacgcagattatcgggagatcccgtgatgaagttgcaatatgcttctttaacaccaaagaaaagaaaaatttacaggagctggctggtgtatatgtttacaatgccacagaaagagagcaacttgatagacctgatgcaagactgattaaagaattttcttgtgtagaagattcttttatgaataccattggaagccggtatggaataacctctggatctagagagaataccctgtacaatgctctttgggttgcacaggcactgctgcgtaaaggatctgtgaagactgtgagtaagagaatcctcatattcaccaatgaggatgatccttttggtggtattacaggagcagcaaagactgatatgattaggaccacaattcaacgtgcaaaagatgcacaagatctgggcctgtctatcgaacttcttccattgagtaggcctgatgaggatttcaacatgtccctgttttatgcagatttgattggtctggagggagatgaagtactgcagtatgtgccatctgctggtgaaaagctggaggatatgactgatcaactgagaaagcgaatgatgaaaaagcgcaaagtcaaaactctctcatttgcaattacaaatgatgtttgcatagaggtgaacacatatgcgttaatccgtccaactgctccagggacgatcacgtggcttgactcgatcagtaaccttccattaaagactgaaaggtcattcatatgcaatgacaccggggcccttcttcaggctccccaagagcgcttccagctatacaatgataaagttgttaaattctctgttcgtgaattgtctgatgtgaagagggtttcaagtcatcatcttcgccttttagggttcaagccattggattgcttaaaagattatcataacttaagtccatcaacatttatttaccccagtgatgagcaaatattcggaagcactcgtgtgtttgttgctttacatagctcgatgccgcgtcttggaaggtttgcacttgcgttttacgggaccccaactcgcccacggcttgtagcccttgttgcacaagaagaggttatttcttcgagtggtcaagatgagccacctggaacgcacatgatctatcttccatattcggatgatgttagatatcctgaagaggttcatctgacttctggggatgcacctcgcgctacagatgagcaaatgaagaaagcttcgaatctgttgagacgtattgacctgaagcatttctcagtaagccattttgctaacccaggattgcaaaaacactatgggattttggaggccttagctttaggtgaggatgagatgccggatatgaaggatgagaccctgcccgatgaagaaggcttggctaggccaggagtagttaaagctatagaagaatttaaggctgcagtgtttggtgaaaattatgaccaagaggaagctgaggcagcagcagcaaaaggtggggcctcaaagaagaggaaagcaattgctgatgcagcttcacagaaaagcgcggcctatgattgggcagaccttgcagataatgggaagctgaaggacatgacggtgatgggtttgaaaacttacctgacggcgcatggcctcccagtttctggcaagaaagacgccatcatcagcaggatcttgactcatctaggcaagtgagagacgagaatcgttggctggaatatgcaagacgcctagtgtgcatcctacgtagccatggatgatagacccaccctctctgtttgggacgtggcg

SEQ ID NO: 82 - protein, 626 aa, Triticum aestivum
MDLDPEGIFRDDSDEDDDNLHEREANKEMVVYLIDASPKMFTPANAAKPDEMQETHFHTIVNCITQSLKTQIIGRSRDEVAICFFNTKEKKNLQELAGVYVYNATEREQLDRPDARLIKEFSCVEDSFMNTIGSRYGITSGSRENTLYNALWVAQALLRKGSVKTVSKRILIFTNEDDPFGGITGAAKTDMIRTTIQRAKDAQDLGLSIELLPLSRPDEDFNMSLFYADLIGLEGDEVLQYVPSAGEKLEDMTDQLRKRMMKKRKVKTLSFAITNDVCIEVNTYALIRPTAPGTITWLDSISNLPLKTERSFICNDTGALLQAPQERFQLYNDKVVKFSVRELSDVKRVSSHHLRLLGFKPLDCLKDYHNLSPSTFIYPSDEQIFGSTRVFVALHSSMPRLGRFALAFYGTPTRPRLVALVAQEEVISSSGQDEPPGTHMIYLPYSDDVRYPEEVHLTSGDAPRATDEQMKKASNLLRRIDLKHFSVSHFANPGLQKHYGILEALALGEDEMPDMKDETLPDEEGLARPGVVKAIEEFKAAVFGENYDQEEAEAAAAKGGASKKRKAIADAASQKSAAYDWADLADNGKLKDMTVMGLKTYLTAHGLPVSGKKDAIISRILTHLGK

SEQ ID NO: 83 - DNA, 2322 bp, Oryza sativa
tgatcgacggcaagggaagcggagccggagggtggaggcctaactaaaaccctagggcttccgcgacctcaaccctagttggcttccagaagcttctagaaggtgcccgaggcgtcgtctcggtcgagcgccatggatctggaccccgagggcctcttccgcgacgacagcgacgaggatgacgacaacgtccaggagagggaggccaacaaggagatggtcgtctacctcatcgacgcctcgcccaagatgttcacccctgcgaccaaggcagatgaaaaggaggagacacattttcatacgatagtgaactgcatcacacatgcgctgaagacgcagattatcggtagatcctatgatgaagtcgctatatgtttctttaacacgaaagaaaagaagaatttacaggaattggctggtgtttatgtttataatgttacagagagagaaccacttgataggcctgatgcaagattgattaaggaattttcttgtatagaagattcttttatgagtaatattggaagtcggtacggaataacttctggatctcgagagaataccttgtacaatgctctttgggttgcacaggcattgctgcgtaaaggatctgtgaagactgtgagtaagcggattgttatattcaccaacgaagatgatccttttggtggtcttacaggagcagtaaagactgatatgataaggacaacaatccaacgtgcaagagatgcacaagatcttggcctgtccattgaacttcttcctttgagtaggcccgatgaggagttcaacatgtccctgttttatgcagatttaattggtctggagggagatgaaatagtggattatctgccatcttctggtgaaaagctggaggatatgactaatcagctgaaaaaacgaatgatgaagaaacgcaaagtcaaaactcttgcatttgcaattaccaatgatgtttgcatagaggtgaatacatatgcgctaatccgttcaactactccaggggcaattacatggcttgattctatcagcaacctgccattgaaggctgaaaggtctttcatatgcaatgacactggggcccttattcaggatccacaaaagcgcttccaggtgtacaatgacaaaattgttaaattctctactcgtgaattgtctgatgtgaagagggtttcaagtcatcatctacgccttttaggattcaagccactggactaccttaaagattatcacaacttaagaccgtcaacatttatttaccccagtgatgagcaaatatttggaagcactcgtgttttcgttgctttacatagctcaatgcggcgtcttggaaggtttgcacttgcattttacgggaatccaactcgcccacaacttgtagcccttattgcacaagaagaggttacttctgctggtggtcaaattgaaccacctggaatacacatgatctatcttccatactcggatgatgttagatatcctgaggaggttcatctgacttctgatgatgcacctcgtgccacagatgaacaaattaagaaagcttcaaatctattgagacgtattgatttgaagaacttctcagtatgccaattttctaacccagcattgcaaagacactatgggatcttggaggccttagctttaggtgaagatgagatgccagatgtcaaggatgaaacccttcctgatgaagagggcttggctaggccagtagtagttaaagctgtcgaggaatttaaggcttcagtctatggtgaaaattatgatcaagaggaagccgaggcagcagcagcgaaggctggggcttcaaagaagaggaaagcacttactgatgcagctgcagagaaaagtgcagcacataattgggcagaacttgcggatactggaaagctgaaggacatgacggtggtggacttgaaatcttacctgagtgcacatggcctcccagtttctggaaagaaagaggcactcgtcagcagaatcttgactcatctaggcaagtgaaatggtccacttcgacggcctactcagttttagctaactctgtaagctatctaaatttctctgaacatcttgaagtgcctatcaaaaaccctctccctgcttaggctgtgccaaattttgtagcaatatgacaacagctgaccccagttcatttggtatcatgtgcttttgtgacatgtaccactgggatttctcttaaatgtcactccagtctgcagagatcagatcattgttggtagaggaaagtgatccattagagaaagcaacaccaaacaagattattaagacattttttaagtgaagcagttgcaacca

SEQ ID NO: 84 - protein, 624 aa, Oryza sativa
MDLDPEGLFRDDSDEDDDNVQEREANKEMVVYLIDASPKMFTPATKADEKEETHFHTIVNCITHALKTQIIGRSYDEVAICFFNTKEKKNLQELAGVYVYNVTEREPLDRPDARLIKEFSCIEDSFMSNIGSRYGITSGSRENTLYNALWVAQALLRKGSVKTVSKRIVIFTNEDDPFGGLTGAVKTDMIRTTIQRARDAQDLGLSIELLPLSRPDEEFNMSLFYADLIGLEGDEIVDYLPSSGEKLEDMTNQLKKRMMKKRKVKTLAFAITNDVCIEVNTYALIRSTTPGAITWLDSISNLPLKAERSFICNDTGALIQDPQKRFQVYNDKIVKFSTRELSDVKRVSSHHLRLLGFKPLDYLKDYHNLRPSTFIYPSDEQIFGSTRVFVALHSSMRRLGRFALAFYGNPTRPQLVALIAQEEVTSAGGQIEPPGIHMIYLPYSDDVRYPEEVHLTSDDAPRATDEQIKKASNLLRRIDLKNFSVCQFSNPALQRHYGILEALALGEDEMPDVKDETLPDEEGLARPVVVKAVEEFKASVYGENYDQEEAEAAAAKAGASKKRKALTDAAAEKSAAHNWAELADTGKLKDMTVVDLKSYLSAHGLPVSGKKEALVSRILTHLGK

SEQ ID NO: 85 - DNA, 2313 bp, Glycine max
tttaaaccgagttctaaaatttcccgttgtttggtttggtaaaggcaaagggcactgcgttgacggtcgaaattctgggcgcgcattagagagaaaaaagggtttgtatttgagaactgagaagtggggaagatggatttggacggtgatgataatgataatgacatcttcagagacgacgaagatgatcctcaagctcaactctctctcctcgaaaacgagtcgagcaaagaatatgtggtttaccttgtcgatgcttcacctaaaatgttcagcactacttgccctgcggaagaagacgaccaaaatggtgaaactcacttccacattgccatctcttgtatctctcaaactctcgagtctcagatcattaacagatcctacgaccaagttgccatatgcttcttcaacactagggagaagaacaatttacaagacttaaacagtgtttttgtatttaatgttcctgaaagagagtttctggacaggccaacagcaaggctcataaaagaattttatcagctggaggaatcattttcaaaaatcattggaagtcagcatggcattgtgtctgggactcgagaaaattctctctacaatgctatctgggcggctcaggcacttcttcgtaaagggtcagcaaagacagttgacaaacgtatacttttgttcacaaatgatgatgatccttttgggagtatcaaaggggcagtaaaatcagatatgacaagaatgacactgcagagagctaaagatgcacaggatcttggcatttctattgaacttcttcccttgagtcaccctgatgaggtgttcaatgtatctcaattctatgctgatttgattgggttggaaggagatgatcttgtagactttatgccatcagcaggaaagaaattggaggatatgaaagatcagttaagaaagcgcatgtttaccaagcgcatagtcaaaagacttaagttcatgatagttaatgggatatcaatagaactgaattcttatgctttaattcgtcccaccgtcccaggagctatcacatggcttgattctgttactaatcatcctttgaagattgaaagaactttcatttgtgttgatactggtgcattggtggaagaacctactaaacggtttcttccttataaaaaccagaatattatattttcaatgaagcaactctctgaaattaaaagagtttctactggacatctacatcttttagggttcaagccactgagttgcttgagagattattacaacttgaagccatcaactttcctttatcctagtgacgagggtacagacagcagcatgtgcatgttcattgcccttcataggtccatgatacagctcaatcgttttgctgttgcatttagtggtagttcctctcgccctcaattggttgctcttattgcgcaggaagaagttatccaatcaggtggtcagattgagccgcctggaatgcacatgatttatcttccatattctgatgacatcagatttgttgaagagcgttattcagatacaagtgggatggtgaatatagcaagtgatgatcaaataaaaaaggcagccaatctaattaagcgtattgacttgaaagatttttctgtatgccaaatttccaaccctgccttgcagagacactatgcagtattgcaggcattggcactggaagaggatgatattccggaaatgaaagatgaatcattacctgacgaggaaggcttagccagaccaggagtggtaagagcattagaagaattcaaaacctctgtatatggggataattatgatgaggaaaatgagcctggcactgagaagcctactgaagcctccaagaaacgaaaagcaaatgctgagtttgcaacaaaagagtgtgaaaactatgactggggtgatcttgctgatactgggaagttaaaggacttgactgtggtggagttaaaatattatcttacagcacataatcttcctgtttctgggaagaaggaggccataattagccgaatattaactcacatggcaaaatgagcaaggggctgacgtttttgttaatgattttgcaacctcgataactagaatgcaagactcctcttagccaccagagctgctaaatcgatgtttggtttattattgttgacccggtttggataaaagactgatttgtacttgactgatcaacatggcagtatagtatgtaatagcatattttactggtagaagataatccttgttagacctccaaccacaaagtaacacatcttattttgcaaaatgtgaagttatttatatcttcctttttattca

SEQ ID NO: 86 - protein, 634 aa, Glycine max
MDLDGDDNDNDIFRDDEDDPQAQLSLLENESSKEYVVYLVDASPKMFSTTCPAEEDDQNGETHFHIAISCISQTLESQIINRSYDQVAICFFNTREKNNLQDLNSVFVFNVPEREFLDRPTARLIKEFYQLEESFSKIIGSQHGIVSGTRENSLYNAIWAAQALLRKGSAKTVDKRILLFTNDDDPFGSIKGAVKSDMTRMTLQRAKDAQDLGISIELLPLSHPDEVFNVSQFYADLIGLEGDDLVDFMPSAGKKLEDMKDQLRKRMFTKRIVKRLKFMIVNGISIELNSYALIRPTVPGAITWLDSVTNHPLKIERTFICVDTGALVEEPTKRFLPYKNQNIIFSMKQLSEIKRVSTGHLHLLGFKPLSCLRDYYNLKPSTFLYPSDEGTDSSMCMFIALHRSMIQLNRFAVAFSGSSSRPQLVALIAQEEVIQSGGQIEPPGMHMIYLPYSDDIRFVEERYSDTSGMVNIASDDQIKKAANLIKRIDLKDFSVCQISNPALQRHYAVLQALALEEDDIPEMKDESLPDEEGLARPGVVRALEEFKTSVYGDNYDEENEPGTEKPTEASKKRKANAEFATKECENYDWGDLADTGKLKDLTVVELKYYLTAHNLPVSGKKEAIISRILTHMAK

SEQ ID NO: 87 - DNA, 1419 bp, Solanum tuberosum
acaagtcacattttaaaacctaaagcttcttcatttcttcaagtgacttcaactgctttgttcaaaaaaatcttcgatatgtcaatggacctcgacccagatgaagtctttcgtgacgatgaagatgaccctgaaaatgaattcttcaaggaaagagatgctattaaggaattattggtgtatcttgtggatgcttcacctaaaatgttttccactacttgcccaacggatgatgaaaagactgcaactcattttcaagttgccatcaattccattgcacaatctctcagaactcagattattaataggtcttatgatgaagtttctatatgcttctttaacactcgggaaaaaaagaacttgcaggacctaagtggcgtttatgtatttaatgttccagaaagagaggatctggacagaccaacagctaggctaattaaagaatttgatcaaatagaagaaagatttgaaaaagaaataggaagtaagtatggaattgtgcctggctctcgtgagaattctctttacaatgctctttgggttgcacaagcccttctccgtaaaggatctgcaaaaactgctgataaacgcattctcttgcttacaaatgaagatgatccttttggtaatctcaaaggtgtcataaaagtggatatgatgaggacaacgatgcagcgtgccaaagatgctcaagatcttggtattacaattgagcttcttccactaagccggccagatgatgagttcaacgtttcccttttttatgctgatttacttggtctggagggtgatgaccttgctcagttcaaagctctgataggagagaggtttgaagatctgaacgaccagctaaggaaacgaatgtttaagaagcgcagagttcgaagacttagatttgcgatttttaatggattatctatcgaacttaacacctatgctttgatccgtccaactaatccagggacaattacttggcttgattcgatgactaatcttcctttgaagactgagagatccttcatatgtgctgatactgctgctataattcaggagcctccaaaacgctttcagtcttacaaaaatgagaatgtcatgttttctgtggatgagctttcagaagtcaaaagagtttcaactggacatcttcgtctgctgggcttcaagccattgagctgcttaaaggactatcataacctgaagccagcaacttttgtctttcccagtgatgaggaagtggttggaagcacttgtcttttcgttgctctccacagatcaatgttgcggcttaagcgttttgcagttgctttctatgggaattcaagtcatcctcaattggttgctcttgttgcacaagtaagacattgtgtttcccctccaaatcctttcggattatatgtagactaaatctgcctatttatg

SEQ ID NO: 88 - protein, 441 aa, Solanum tuberosum
MSMDLDPDEVFRDDEDDPENEFFKERDAIKELLVYLVDASPKMFSTTCPTDDEKTATHFQVAINSIAQSLRTQIINRSYDEVSICFFNTREKKNLQDLSGVYVFNVPEREDLDRPTARLIKEFDQIEERFEKEIGSKYGIVPGSRENSLYNALWVAQALLRKGSAKTADKRILLLTNEDDPFGNLKGVIKVDMMRTTMQRAKDAQDLGITIELLPLSRPDDEFNVSLFYADLLGLEGDDLAQFKALIGERFEDLNDQLRKRMFKKRRVRRLRFAIFNGLSIELNTYALIRPTNPGTITWLDSMTNLPLKTERSFICADTAAIIQEPPKRFQSYKNENVMFSVDELSEVKRVSTGHLRLLGFKPLSCLKDYHNLKPATFVFPSDEEVVGSTCLFVALHRSMLRLKRFAVAFYGNSSHPQLVALVAQVRHCVSPPNPFGLYVD

SEQ ID NO: 89 - DNA, 2238 bp, Solanum lycopersicum
cttctccaacaagcttatattcagaacaagtcacattttaaaacctaaaccttcttcactttattgttcaataaaatcttcgatatgtcaatggacctcgacccagatgaagtcttccgtgatgatgaagatgaccctgaaaatgaattcttcaaggaaagagataatactaaggagttcttggtatatcttgtggatgcttcacctaaaatgttttcctctacttgcccaacggatgatgaaaagattgcaactcattttcaagttgccgtcagctcaattgcacagtctctcagaactcagattattaataggtcttatgatgaagtttctatatgcttctttaacactcggggaaaaaagaacttgcaggacctaagtggcgtttatgtatttaatgtccgagaaagagaggatctggacagaccaacagctaggctaattaaagaatttgatcaaatagaagaaagatttgaaaaagaaataggaagtaagtacggcattgtgcctggctctcgtgacaattctctttacaatgctctttgggttgcacaagcccttctccgtaaaggatctgcaaaaactgctgataaacgtattctcttgcttacaaatgaagatgatccttttggtaatctcaaaggtgtcataaaagtggatatgatgaggacaacgatgcagcgtgccaaagatgctcaagatcttggtattacaattgagcttcttccactaagccggccagatgatgagttcaacgtttcccttttttatgctgatttacttggtctggagggtgatgaccttgctcagttcaaagctctgataggagaaaggtttgaagatctgaacgaccagcttaggaaacgcatgtttaagaagcgcagagttcgaagacttcgacttgtaatttttaatggattatctatcgaacttaacacctatgctttgatccgtccaactaatccagggacaattacttggcttgattcgatgactaatcttcctttgaagactgagagaaccttcatatgtgctgatactggtgctatagttcaggagcctctaaaacgctttcagtcttacaaaaatgagaatgtcatcttttctgcggatgagctttcagaagtcaaaagagtttcaactggacatcttcgtctgttgggcttcaagcctttgagctgcttaaaagactatcataacctgaagccagcaacttttgtctttcccagtgatgaggaagtggttggaagcacttgtcttttcgttgctctccaaagatcaatgttgcggcttaagcgttttgcagttgctttctatgggaatttaagtcatcctcaattggttgctcttgttgcacaagatgaagtaatgactcctagtggtcaagtcgagccaccagggatgcatctgatttatcttccatattctgatgatatcagacatgttgaagagcttcatactgatcctaattccgtgcctcatgccactgatgaccagataaagaaggcctccgctttagtgagacgtattgacctcaaagatttttctgtgtggcaatttgctaatcctgcattgcagagacattatgcagtattacaagctcttgcacttgatgaagatgagatgcctgaaattaaagacgagactcttccagatgaagaaggaatggctaggcctggtattgtcaaagcattggaggaattcaagctctctgtttatggagagagctataaggatgaagactcaaacattgaaggaaaagctgagccaactaggaaacggaaagcaaatgctataaaagaatatggtaattatgagtgggctgaccttgcagataatgggaagttgaaggacatgacagttgtagaattgaagtattatctaggtgcacatgaccttccagtcagtggaaagaaagaagccttgattagtaggatcttaactcacatgggcaagtgagttgtgactttcagatctttggcggtctgccattagtttgtacagaatggttctttttgctgcagcctgttgagtagttagtttttgtttctcgttgaaacctttatgtcttggcattattatggaaattaagaggtctcattacctgttgcttcatgtagatgaaacattgttgtaacttgatccttttgcttcatgtgtaaaaaattgttgtgacttgatcaaagaaagtcaatggtgaacgaatgtaaaccccctcttttctagttgttgagacaa

SEQ ID NO: 90 - protein, 624 aa, Solanum lycopersicum
MSMDLDPDEVFRDDEDDPENEFFKERDNTKEFLVYLVDASPKMFSSTCPTDDEKIATHFQVAVSSIAQSLRTQIINRSYDEVSICFFNTRGKKNLQDLSGVYVFNVREREDLDRPTARLIKEFDQIEERFEKEIGSKYGIVPGSRDNSLYNALWVAQALLRKGSAKTADKRILLLTNEDDPFGNLKGVIKVDMMRTTMQRAKDAQDLGITIELLPLSRPDDEFNVSLFYADLLGLEGDDLAQFKALIGERFEDLNDQLRKRMFKKRRVRRLRLVIFNGLSIELNTYALIRPTNPGTITWLDSMTNLPLKTERTFICADTGAIVQEPLKRFQSYKNENVIFSADELSEVKRVSTGHLRLLGFKPLSCLKDYHNLKPATFVFPSDEEVVGSTCLFVALQRSMLRLKRFAVAFYGNLSHPQLVALVAQDEVMTPSGQVEPPGMHLIYLPYSDDIRHVEELHTDPNSVPHATDDQIKKASALVRRIDLKDFSVWQFANPALQRHYAVLQALALDEDEMPEIKDETLPDEEGMARPGIVKALEEFKLSVYGESYKDEDSNIEGKAEPTRKRKANAIKEYGNYEWADLADNGKLKDMTVVELKYYLGAHDLPVSGKKEALISRILTHMGK

SEQ ID NO: 91 - DNA, 2307 bp, Sorghum bicolor
tccttctttcttccccgagaagtcgcgccgtaggcccgagccgagtttcgctttgtttcttcctcgagaagacagagcaagcgcggaagccttaaaccctagcgagtttctagaaccttccagtcccaccagaagcctgacccctcgctcggaagccgcggcgccatggacctggacccagagggcatcttccgcgacgacagcgatgaggacgaagacaacgtccaggagagggaggcgaacaaggagatggttgtctaccttgtcgatgcctcgcccaaaatgttcacccctgctaccacccaggacaatgaaaagcaggagacacattttcgtaccattgttagctgcatcactgagtctctcaagacgcaaattattggtagatcttatgatgaagtcgcaatatgtttctttaacactaaagagaagaagaatttacaggactcagctggtgtttatgtttataatgttggagacagagaagaacttgatagacccactgcaaaactcatcaaagatttttcttcaatagaagattcttttatgagcaccattggaagtcgatatgggataacatctggatctcgggagaataccctgtataatgctctttgggttgctcaggctttgctgcgcaagggatctgtgaagactgtcagtaaacgaattcttatattcaccaatgaagatgatccttttggtactattacaggagcagtgaaaactgatatgattaggacaacagttcaacgtgcaaaggatgcacaagatcttggcctgtctattgaacttcttccactgagccggcctgatgaacagttcgacatgtccctattttatgcagatttaattggtctggacggggatgagataaccgagtatttgccatctgctggtgttaggctagaggatatgtctaatcaactgagaaaacgaataatgaagaagcgcagagtcaaaactctttcatttgcgattacaaatgatgtgtgcatagaagtgaatacatatgcgctggtccgtcctactactccagggacaatcacatggcttgattcactaagtaaccttccattaaaggctgagaggtctttcatatgcaatgatactggggctctacttcaggatgcacagacacgtttccagatgtacaatgacacaactgtcaaattttctgtacgtgaactctctgaggttaaaagggttgcaagccatcatcttcgccttttaggtttcaagccattggattgcttgaaagattatcataacttaagaccatcgacatttgtttatccgagtgatcagcgtatatttggaagcactcgtgttttcgttgctttacatagctcaatgttacgtcttggaaggtttgcacttgcattttatgggaatccaactcgaccacagctcgtagcccttgttgctcaagaagaggttacttcctctggtggccagtttgaaccacctggcatgcacatgatctatcttccatactccgatgatattagatatcctgaagaagttcatgtgacttttgatgatgcaccgcgcgcaacagatgaacaaataaagaaagcttcaaatctattcaaacgtattgatctgaaaaatttctctacatgccaattagctaacccagctttgcaaagacactatgggatcttggaggccttagctttaggcgaagatgagatgcctgatataaaggatgagaccctgcctcacgaagaaggcttgtctaggccaggggtagtcaaagctattgaggaattcaagacatcagtatatggtgaaaattatgaccaagaggaggcagaagcagcagcagggaaagcttcccgtggtgatgcttcaaaaaagcggaaggaaatcactgatgcagctgcgcagatgagtgctgtttatgattgggcagaacttgcagacaatggaaaactgaaggaaatgacggcggcggaattgaaatgctacctgaccgcgcatgacctcccggtttctggtaagaaagacgtacttgtcagcaggatcttgactcatctgggcaagtgaagccgcgtactcagaactgttaagctttctcagaccggctgtcatctgtagtgctgtctgacggctagcttgcgctaagcccgtaaccctcccctgtttaggctacgtgccaattttttgtatagcgaaatagacggcaccagttgccaattaacatgtgttaaattttatcttggtatcatctgcttttgtcgtgtcgttcggaatagttggagagccactagatagtgccctctctggcacgactcccgcggc

SEQ ID NO: 92 - protein, 628 aa, Sorghum bicolor
MDLDPEGIFRDDSDEDEDNVQEREANKEMVVYLVDASPKMFTPATTQDNEKQETHFRTIVSCITESLKTQIIGRSYDEVAICFFNTKEKKNLQDSAGVYVYNVGDREELDRPTAKLIKDFSSIEDSFMSTIGSRYGITSGSRENTLYNALWVAQALLRKGSVKTVSKRILIFTNEDDPFGTITGAVKTDMIRTTVQRAKDAQDLGLSIELLPLSRPDEQFDMSLFYADLIGLDGDEITEYLPSAGVRLEDMSNQLRKRIMKKRRVKTLSFAITNDVCIEVNTYALVRPTTPGTITWLDSLSNLPLKAERSFICNDTGALLQDAQTRFQMYNDTTVKFSVRELSEVKRVASHHLRLLGFKPLDCLKDYHNLRPSTFVYPSDQRIFGSTRVFVALHSSMLRLGRFALAFYGNPTRPQLVALVAQEEVTSSGGQFEPPGMHMIYLPYSDDIRYPEEVHVTFDDAPRATDEQIKKASNLFKRIDLKNFSTCQLANPALQRHYGILEALALGEDEMPDIKDETLPHEEGLSRPGVVKAIEEFKTSVYGENYDQEEAEAAAGKASRGDASKKRKEITDAAAQMSAVYDWAELADNGKLKEMTAAELKCYLTAHDLPVSGKKDVLVSRILTHLGK

SEQ ID NO: 93 - DNA, 2566 bp, Beta vulgaris
taaagcttcttcagcaatctttttcgtttactcaatacaaacatttctcaacatctcttcgtttcttccctccttcacgtcccaaaccatggctcgaaacaaggaatcactggttttattgcttgatgttggtccaaagatgcatggtgttcttccacaagttaagaaagtctgtgccatgcttttggagaagaagctcatttataacaaattcgatgaagtagggattgtcttatttggaactgcagaaacaaacaatgagctcactgcagaagttggtggatatgagaatattgtggttctgagaggtataaaggttgtagatggggacctggttgatgctctggaagaacttccacaagggacggttcgcggtgattttcttgatgcaattgttgttggaatggatatggtaataaagaagtatgggccaactaacaagggaaagaaacgcctctgtctaatcactaatgccctctctcatctaagagatccatatgaaggaacaaaagaagatcaagtcagtactattgctctgcaaatgactgagcaggccataaagttggaatgtgtagtagttagaggggaactaagtggtgatgctgataagaatgttatggatgagaatgacaagctattaaaccttttcacaaagagaacctgggcaaagactgtttatgttgaaactccgacgtcactgctaggagcactcaggacacgaagcatagcccccatcactatcttcaggggtgatcttgaagtgagctctagattgaaaattaaggtttgggtgtacaagaaaacttctgaggaaagatttccaaccctgaagaagtattcagataaagcaccttgtactgataaatttgctacccatgaaatcaaggtggattatgagtatagaagcattcacgaaccagacaaagttgtacctccagaacaaaggattaaaggttatcgttatggaccagaagtggtccccatctcatctgatgcatgggaagctgtcaagttcaaaccagagaagggcttgaagctcctcggattttctgatgctaaaaacatactacgccaatattacatgaaagatgtcaacttattcataggtgagcctggcaaaagagaagcggttattgcagtttccgctttggctagagcgatgaaggaattgaataaggtggccatagttcgctgtgtttggaggcaaggacaggcaggtgttgtgattggggttttgtcaccaaatgtatctatgaaggacaatattcctgattcactgtacttcaatgtactcccatttgctgaggatgttcgggagtttcaatttccttctttcaagaatctcccagcaacatttcagccaaatgacgaacaacaggaggctgctgataatctagtaaggatgcttgacctggcaccacctgccaaagaagagattttaaagcccgacctaacaccaaatcctgttctagagcggttttaccactttctagacctaaaaacaaagaacccagatgcagctattcctccacttgatgaagccttaaagaggataactgaacctgatgcagaacttctttctaaaaacaagtctgtaattgatgaatttcgaagatgctttgaagtaaaggagaattttaagaggaagaaatctgctaggtcatacaaggagaagccatctggatctgatgatgagaaagaggctgcagaagatgttaacatggagaaaacactgaaaaccactgataatgattctgcagttaagattcagaacagtgatgataaaccatccagtgctctggcaaataattctcttgccattgttgagaagattgggaatatctctccagtccaggattttgaagctatgttatctcatagagataacccagattgggttagtaaagcaatcaaaggtctgaagagcaaaattcttgaacttgtagaggattcggttgcaggaaataattatgacaaagcagtcgagtgtctcgttgcccttcgaaaaggctgtgtcctcgaacaggaacccacacaattcaacaattttctgcagtatctttacagattctgcaaagaacatgagctgaatgatttctgtgagctccttgtcttgaaagggatgacattaatcacaaaatccgaagccgaagacagtgatgtggcagatgaagcagccagaagttttttggttccgaaagatcccaaggttgaatgagaactcgtataattcaactggtgtaaatatctgacttgcgcactctgcgtgcttttttggccccttgctatggggcggagacaggaggaaaagcgtagtggttgtagtgatacactaaaactattactgttacatgtatcatatctgacttgcgcactctgcgtgcttttttgcccctttgctttgaggcggagacaggaggaaaagcgtagtggttgtagtgatacactaaaactattactgttactgttactgttactgttacatgtatcatgtatgctaattgctgatgtacatttttctaccggtagtagccaattttctccgaccccctccattgtcctttaa

SEQ ID NO: 94 - protein, 709 aa, Beta vulgaris
MARNKESLVLLLDVGPKMHGVLPQVKKVCAMLLEKKLIYNKFDEVGIVLFGTAETNNELTAEVGGYENIVVLRGIKVVDGDLVDALEELPQGTVRGDFLDAIVVGMDMVIKKYGPTNKGKKRLCLITNALSHLRDPYEGTKEDQVSTIALQMTEQAIKLECVVVRGELSGDADKNVMDENDKLLNLFTKRTWAKTVYVETPTSLLGALRTRSIAPITIFRGDLEVSSRLKIKVWVYKKTSEERFPTLKKYSDKAPCTDKFATHEIKVDYEYRSIHEPDKVVPPEQRIKGYRYGPEVVPISSDAWEAVKFKPEKGLKLLGFSDAKNILRQYYMKDVNLFIGEPGKREAVIAVSALARAMKELNKVAIVRCVWRQGQAGVVIGVLSPNVSMKDNIPDSLYFNVLPFAEDVREFQFPSFKNLPATFQPNDEQQEAADNLVRMLDLAPPAKEEILKPDLTPNPVLERFYHFLDLKTKNPDAAIPPLDEALKRITEPDAELLSKNKSVIDEFRRCFEVKENFKRKKSARSYKEKPSGSDDEKEAAEDVNMEKTLKTTDNDSAVKIQNSDDKPSSALANNSLAIVEKIGNISPVQDFEAMLSHRDNPDWVSKAIKGLKSKILELVEDSVAGNNYDKAVECLVALRKGCVLEQEPTQFNNFLQYLYRFCKEHELNDFCELLVLKGMTLITKSEAEDSDVADEAARSFLVPKDPKVE

SEQ ID NO: 95 - DNA, 2498 bp, Zea mays
cttcctccgcactccgccgcgccggccagtcgtcttgtccccctcgccgcctccgcgctcgtcttgctcctcttcggctcccctccccgccacctcgtcccaccccgccccttgggttgagttgagctactcgaccgtcagtcaattcctgcaccaggcgttgggcgggttttcatgggggcagcataaaagcctcttcggttcttcccctagctctgcctcgcggcaagtccccctccgctacgttcgccatggctcgcaacagggaagtggtgattttgctgttggatgttgggccttcgatgcatggagtgctgctagaggtgaagaacgtatgcttgactcttgtgcataagaagctagtttataacaggagcgatgaagttggtattgtcctctttggtactaaaggaacatgcaatgagcttgcaaaggacattgggggctataagcatgtgacggtcatacatgatattaaagttgtagatgaaggaacggcacaggctctgcaaaaccttccattaggatctgcccctggtgattttctggattctattgttgttggcttggatatggtgattaggaaatttggtattaccaaagggaagcggcggctctgtctaatcactagtgcacaagaactgttaagagatccgcctgaggggaccaaagaagatcaggtggacaccattgcagacatgttgaaaaaacacaatatcaagatggagtgcattattttcagagaaccgggagtgcatcataatgatgtaatggaagaaaatgaccgactattgcatcagttcagaaatagatcagtagcaaaggtagttcaggttgacaacccaacatcactgttgggtgctctcaagacaagaaatgtgctcccagttaccgttttcaggggagacctggaagtgaactccaattttaaaataaaggtgtgggtttataagaaaacagctgaggaaaaattccccactttgaagaagtattcggacaaagctcctccaagtgataaatttgcttctcatgaagtcaaagttgattatgagtacaagagtgttgttgagccagacaaagttgttccaccagaccagaggattaaggggtatctctatggtcctcaagttattcctgtatcaaatgctgaatgggaggcagtcaagttcaagccagagaaaggtgtgaagcttctaggatttacagatagatccagcgtaccacggcaccaatttatgaaagatgtatgcctgtttatacctgaaccaggcaacatgaaagcaagtcttgcagtttctgcgatagcaagagcaatgcatcaaatgaacaaggttgctatagtgcgatgtgtgtggaggcaaggtcaagggaatgttgctattggtgtattgacgccaaacatttcatcagtgaacactatccaagattccttttacttcaatgtgctcccatttgctgaggacatcagagagtttcagtttcggtccttcagcagcctgccatcatcatctcagcccactgaagaacaacaagaagctgcagataacctagtgaagatgttagacctagcaccacctggaagagaggtcctcaagcctgagtttacgccaaatcccatcttggagagattttacagttaccttgatctcaagtcaaagcagccagatgcaaatgtcccaccgcttgaaagatctctaaggaggataaccgaacctgatcctgatgtggttggccaacaaacacaattaatccagaatttaagcaaagcttttgtgctgaaggagaaccccaagaaaaagaaagcacgaacacaggaattgttggcatatactggtgcaggtgatcaagctaaatctgtagaggacagagttctggaaaatacacatccttcaacagagaatgttgtggcaatcagagattcaaatccagttcaagattttgaggccatgctggctaagagatctagctcaacatggactcagaaggctattggagatatgcagaattacatagcagctttgttacagaactccagtgatgggggcaactatcaaaaagcacttgaatgttttgcttctctgcggaaggcctgtattattgaacaggaaccacaggaattcaaccagttcctaacgaacatttacgagagattgaaggaaggtgatgctgccaagttctttcaacttctctcctcaaaaaacatttcacttatcaacaaagaggaagcgcctgacagtgatgtgactgaagagatggcaagaagtttctacctgaaacgagaaaaggcgtctcagtaggagctggaagaagccggtaactcgaagcgccttgggtttggagatcatcggaggactggattgtgaaactgggtatctgcatgttttgaaactgggtatctgggtggaactggaactaatactcaaactctctgggttgagtcactgttttgctgcacaatctgctgcctactacgtttcgactaaaaaaaaaaaaaaaaa

SEQ ID NO: 96 - protein, 681 aa, Zea mays
MARNREVVILLLDVGPSMHGVLLEVKNVCLTLVHKKLVYNRSDEVGIVLFGTKGTCNELAKDIGGYKHVTVIHDIKVVDEGTAQALQNLPLGSAPGDFLDSIVVGLDMVIRKFGITKGKRRLCLITSAQELLRDPPEGTKEDQVDTIADMLKKHNIKMECIIFREPGVHHNDVMEENDRLLHQFRNRSVAKVVQVDNPTSLLGALKTRNVLPVTVFRGDLEVNSNFKIKVWVYKKTAEEKFPTLKKYSDKAPPSDKFASHEVKVDYEYKSVVEPDKVVPPDQRIKGYLYGPQVIPVSNAEWEAVKFKPEKGVKLLGFTDRSSVPRHQFMKDVCLFIPEPGNMKASLAVSAIARAMHQMNKVAIVRCVWRQGQGNVAIGVLTPNISSVNTIQDSFYFNVLPFAEDIREFQFRSFSSLPSSSQPTEEQQEAADNLVKMLDLAPPGREVLKPEFTPNPILERFYSYLDLKSKQPDANVPPLERSLRRITEPDPDVVGQQTQLIQNLSKAFVLKENPKKKKARTQELLAYTGAGDQAKSVEDRVLENTHPSTENVVAIRDSNPVQDFEAMLAKRSSSTWTQKAIGDMQNYIAALLQNSSDGGNYQKALECFASLRKACIIEQEPQEFNQFLTNIYERLKEGDAAKFFQLLSSKNISLINKEEAPDSDVTEEMARSFYLKREKASQ

SEQ ID NO: 97 - DNA, 2425 bp, Brassica napus
tcaacccaatttgatcaaaaaaaaaaaagtttcaacccaaaagaaaaagaaaattgtcgtcttcttcaattcttcttcgtcgtcttcacctccatttttaaagcagtaggttgtcaatggcgcgtaaccgggagggtttggttttgttggtggatataggccctgccatgcatagtgtactccctgatgtcgaaaagacatgttctttgctcatgcaaaagaagttgatttacaacaagtttgatgaagttggaattgttgtctttggaactcaagaaaccgaaaatgagcttgctagggacataggtggatatgagaacattaaggtgttaaggaacatcaaagttgttgatgaactcgtggttgatcttgtaaagcgtctccctcgaggacctgtagctggcgactttcttgatgctttgattgttgggatggatatgcttataaagatgtatggtgctgggcaaaaagggaaaaagcggttgtgtctcatcaccaatgcagcttgtcctaccaaagatccatttgaagggaccaaagatgagcaagtcagtaccattgctgtgaaaatggctgcagagggtataaagatggagagcattgttatgagggctgatgcaagcggtgatgttgatgagaagacaatagaggagaatgatcatttgttgagtttattctccaccaacgccattgcgaaaacagtgtatgttgagagtccactctcactgctaggttccttaaagacccggagagttgctcccgttactctgttcagaggtgaccttgagattaacccaacaatgaagatcaaggtgtgggtttataagaaagtcgctgaggagagacttcctacgctaaaaatgtattctgacaaggcccctccaagtgacaagtttgctaaacacgaagtgaagatcgattatgattataaagttaccgcagagactagtgaagttcttgctccagaagaaaggatcaagggctttcgctatggacctcatgtcattcctatctcaccggatgagatggaaacactcaagttcaaaactgaaaagggcatgaagcttcttggattcactgatgcatcaaacatactccgacattattacatgaaagacgtgaacatagttgttccagacccgagcaaagaaaaatctgtgattgcagtctctgcgcttgcaagagaaatgaggcaaacaaacaaggtggcaattgtacgttgtgtctggagaaacggacaagggaatgtagttgttggggtcctcactccgaatgtgtctgaacgagatgacacccctgattctttctacttcaacgtgctgcctttcgccgaggatgtccgcgagtttccgtttccttctttcagtagatttcctgcgtcgttgaagcctgatgagcaacagcaagcggtggctgataacttggttaagatgcttgaccttgcaccttctcctaaagaggaagtgctaaagcctgagcttactcctaacccagttctgcagcgcttttatgaatacctcgagttgaaatcaaaatccacggacgctgctttacctccaatgaatgaagctttcaagaggattatggagcaggatccagaactctcttccagcaataaatctataatggattcttttagtggaagttttgaagtgaaggagaacccaaagttgagaaaggcttctaagagattgttaagggataagccatctggttcagatgatgaagacaatcgcatgattacttataatgccaatgagaacagtattgacacagttggagatgcaaacccggttcaagattttgaagctatgatatctcgaagagatggcaatgattggactgataaagcaatcagtgagatgaaaaaacggatagtgaagctggtggaagatagtagtaccaccgatgaaggtgataaagcattggaatgtttgctctctttacgtaaatgctgcgtcttggaacaggagccaaagcagttcaatgagttcttgaaccatctatacgagttatgccaagaaaagaagttgtctcattttcttgaacattttacgtccaagaagatcacaatgattcccaaatcagaagcagcagacagtgatgtggctgacgaggaggctgcagatttcaccctcaaacaagagccaaagctcgagacctaacaaagatcttcactacaatctcacttgtggtagtgtgacaatattttccaaaacgatgctggtgttttgtctgactctttgttgcctgttcaagactcggcacctagtttgttatcgccatcattgctaatttcagaaacgatcttagtgtaaatggctaggactcttttttgatgggtgataaaagtattgaaagtgttattttcaacacaatactactcacaagctcatcttaaaaactcattatcatgttctctctc

SEQ ID NO: 98 - protein, 682 aa, Brassica napus
MARNREGLVLLVDIGPAMHSVLPDVEKTCSLLMQKKLIYNKFDEVGIVVFGTQETENELARDIGGYENIKVLRNIKVVDELVVDLVKRLPRGPVAGDFLDALIVGMDMLIKMYGAGQKGKKRLCLITNAACPTKDPFEGTKDEQVSTIAVKMAAEGIKMESIVMRADASGDVDEKTIEENDHLLSLFSTNAIAKTVYVESPLSLLGSLKTRRVAPVTLFRGDLEINPTMKIKVWVYKKVAEERLPTLKMYSDKAPPSDKFAKHEVKIDYDYKVTAETSEVLAPEERIKGFRYGPHVIPISPDEMETLKFKTEKGMKLLGFTDASNILRHYYMKDVNIVVPDPSKEKSVIAVSALAREMRQTNKVAIVRCVWRNGQGNVVVGVLTPNVSERDDTPDSFYFNVLPFAEDVREFPFPSFSRFPASLKPDEQQQAVADNLVKMLDLAPSPKEEVLKPELTPNPVLQRFYEYLELKSKSTDAALPPMNEAFKRIMEQDPELSSSNKSIMDSFSGSFEVKENPKLRKASKRLLRDKPSGSDDEDNRMITYNANENSIDTVGDANPVQDFEAMISRRDGNDWTDKAISEMKKRIVKLVEDSSTTDEGDKALECLLSLRKCCVLEQEPKQFNEFLNHLYELCQEKKLSHFLEHFTSKKITMIPKSEAADSDVADEEAADFTLKQEPKLET

SEQ ID NO: 99 - DNA, 2324 bp, Helianthus annuus
ttttagttttgacgaaggcgtggttaaaattgggggcgggaagcaaaggaggaaaagcttgtcacatacgattcagaccttcgtcttctccaacgaaaatggcacgaaacaaggaaggattggttttattgattgatgtcagtccatcaatgcacagtgtcttgccggagattcagaaagtttgctctttgctgatacagaagaagctggtttacagcaagtacgatgaagtaggagttgttgtatttggaaccaaagataccaaaaatgatttgacagcagaagtaggtggatatgaacacgtaacagttttgcagccgatcaaagttgtggatggagatcttgttgatgtggtacaacaacttcctcgaggaactgttcctggagattttatggatgcaattgttgtggggatggatttgctaatcaagaagtttcaagaaacaatcaagggtaaaaaacgtatctgtctcgttactaatgcaatgtaccccatcaaagatccatacgaaggtacaaaagaagatcaagtccttaccctcgccgagcagatggcggtacacggcatgaaaattgactgtatcatttatagaggaaaccagaaacgggacccacatgagaataacgtcatcgagaaaaacgacatgctgctgagtatattttcaaagaaaacaaaagcaaaagctgtgcatgttgaaagttcaacttcattgttgggtgcattaaggacccgtaatgtaactcctgtaaccatatacaggggtgatcttgaaataagctcggcatttaagataaaggtttgggtctacaagaaaacatctgaagagagattcccgactcttaaaaagtattctgataacgcaccttcaactgataaatttgccactcatgaaattaaattagattacgagtacaaaattgttcaagatcctagtaaagttgtgcctccagaacaaaggataaagggatatagatatggaccgcaagtgattcctatctcgtctgcagaacttgatgccgtgaaattcagaccggaaaaaagcgtgaaacttttagggttcacaaatgcttcaaatattatgcgacactactacatgaaagacgtcaacatctttatcgctgatccgggcaacaaaaaggcgattcttgcggtttctgcattagtaagagcgatgaaggaaatgaacaaagttgctattttgcggtgtgtttggagacaaggacaatcaaatgttgttataggagtcttaactccaaacgtatctgacaataataatatcgcagattcgttctacttcaatgtacttccttttgctgaagatgttcgagagtttcagtttccatcttttagcagccttccggcatcactgcagccgagtgcagaacagcaagaagctgctgataagttggttatgatgctggatctagcgccagctggcacggaggaatctttaaggcctgaattcaccccaaaccctgttttggagcgattttaccatcatcttgaactgaaatcaaagcatccagatacagctgtaccgccactcgatgaatctctcaaaagaataacagaacctgatcctgaagtaatatctaaaacgaagctcgtgattgatgattttcgaagacattttgaactaaaagagaatcctaagttgaagaaatcgaccaggcggttattgaaggacaaaagttccggatcgtatgaaaaccagtcaactgatttaatagcctctacatctgaagtcaaagtcgagacattgggagatttgactacagtatcggattttgaagctatgatatctcgcagagatagcccggaatgggttagtaaagcgatattcgctatgaaaaataaaatatttgatctggtggagaattcctttgaaggggataattatccaaaggctttagagtgtttaattgctcttagaaaggcttgtgtcattgaacaagaaccgaagcaattcaacaactttctgagccatgtttgtagattctgtcaggagacaaacctgtcaagtttctgtgagtttcttgcctcgaaagatgtcacgtttatcaccaaaacagaggccgaagacagtgaaattgaggaaaaagatgctagaagcttgtttgtgaaagcagagccaagttcataagtagggtgtaacgaggtttgtgatcttgaagatgcacacactttggcaatggaattaagtagcaaatgttcatgaaaatttgtgtgttttgtaattataatggatgttaaaaccgtaagcgtgtttaatatttgaatctgacttgaaaaacccgaaattcaaatcttttttaaattcgaa

SEQ ID NO: 100 - protein, 681 aa, Helianthus annuus
MARNKEGLVLLIDVSPSMHSVLPEIQKVCSLLIQKKLVYSKYDEVGVVVFGTKDTKNDLTAEVGGYEHVTVLQPIKVVDGDLVDVVQQLPRGTVPGDFMDAIVVGMDLLIKKFQETIKGKKRICLVTNAMYPIKDPYEGTKEDQVLTLAEQMAVHGMKIDCIIYRGNQKRDPHENNVIEKNDMLLSIFSKKTKAKAVHVESSTSLLGALRTRNVTPVTIYRGDLEISSAFKIKVWVYKKTSEERFPTLKKYSDNAPSTDKFATHEIKLDYEYKIVQDPSKVVPPEQRIKGYRYGPQVIPISSAELDAVKFRPEKSVKLLGFTNASNIMRHYYMKDVNIFIADPGNKKAILAVSALVRAMKEMNKVAILRCVWRQGQSNVVIGVLTPNVSDNNNIADSFYFNVLPFAEDVREFQFPSFSSLPASLQPSAEQQEAADKLVMMLDLAPAGTEESLRPEFTPNPVLERFYHHLELKSKHPDTAVPPLDESLKRITEPDPEVISKTKLVIDDFRRHFELKENPKLKKSTRRLLKDKSSGSYENQSTDLIASTSEVKVETLGDLTTVSDFEAMISRRDSPEWVSKAIFAMKNKIFDLVENSFEGDNYPKALECLIALRKACVIEQEPKQFNNFLSHVCRFCQETNLSSFCEFLASKDVTFITKTEAEDSEIEEKDARSLFVKAEPSS

SEQ ID NO: 101 - DNA, 2106 bp, Hordeum vulgare
atggcgcgcaacaaggaagggctggttctgctgcttgatgtcggcccgtcaatgcaccgggcgctgcaggaaatcgagaacgtctgcaccaccctcgtgcgcaagaagctggtttttcataggagcgacgaggttggcgttgtcctgtttggaactaaagaaacacacaatgacctcgcgagggaacttgggggctataagcatgtgctggttaagcatgatattaaagttgttgacgaagaaacaaaagatgctcttgaaaatcttcctaggggaactgcccctggtgactttctggatgctattgttgttggtttggatatgctgataaagagatttggagataccaaagcaaagcaacgcctgtgtctaatcaccgacgcgcaacatctgttaagggatccgccccaagggacaaaagaagatcaggtggacactattgcagaccagatgaaaaggcgtgctactaagatgggttgcattgttttcagggaagctggagttcaacacaattccgtaatatgtgaaaatgaccgattattatatcacttcagagatagatcggtggcaaaggtagtccaggttgacaccccgacagcactcttaggtgctctcaagacaagaaatgtactcccagttactatcttcaggggagacctggaagtgaactccacttttaaaattaaggtgtgggcctataagaagacatctgaggagaaattccccactttgaagaagtattctgataaggctcctccaagtgatcagtttgcctcgcatgaagtcaaagtggattatgagtacaaaagcattctagaaccagacacagttgttccaccagatcaaagaatcaagggctatctttatggtcctcaagttgttcctatatcatctgctgaatgggaggctgtgaagttcaagccagagaaaggtgtgaagcttctaggatttgcagatagatccagcgtaccacggtcctattttatgaaagatgtgaactcctttgtacctgaaccgggaaacacaaaagcaattgttgcagtctctgccttagctagagcaatgcaagacatgaacaaggttgcaatcctgcgatgtgtgtggaggcaaaatcaagcgaatgtcgcttttggtgtattgacaccaaatatctcatcagtgaacaatgtgccagattccttttacttcaatatactgccttttgctgaggacgtcagagattttccgtttcgctccttcagcagcctgccaccatcatcacagcctactgaagaacagcaggaagcggcagataacctagtgaagatgttagaccttgcaccacctggaagggaagagatcctcaggcctgatttcacaccaaatcccatgttggagaggttctacagctaccttgatcttaagtcaaagcagccagatgcaaatcccccaccgctccatagctgtctaaggaggataaccgagccagatcctgatgtcattaactatcgagcaccattaatccaaaatttgggcaaagcatttgatctcaaggagaaccccaagagaaagaaagcccggacgcaggagagattggcttatgctggtccagacgatcaagctaaaaaatcagaagatgacgcagggaaggctatggcgatagatgatcaagctaaagatgcagagaaggctagggcgatagaagttctgtttccttcaacagagaaggttgggaagattggagatgtaaatcctgttaaagattttgaagccatgctggcagagagatctagctcaacatgggttcagaaggcaatggaagagatgaagaagtacacgaccgcattgatagaaaattctcctcaaggagattactacgaaaaggcacttgagtgttttgttgctctgaggaaggcctgtataatcgaacaggagccggaggaatataaccaatttgtgaccaagctttacgagagactgaagaaggtggatgatgtggtgaagttctttcagcttctttcatccaagaatgttttgctcatatgcaaagaagaagcgcctgacagcgatgtgactgaagagatggcgaggagcttcttcttgaaaaccgaaatatcctctgagtag

SEQ ID NO: 102 - protein, 701 aa, Hordeum vulgare
MARNKEGLVLLLDVGPSMHRALQEIENVCTTLVRKKLVFHRSDEVGVVLFGTKETHNDLARELGGYKHVLVKHDIKVVDEETKDALENLPRGTAPGDFLDAIVVGLDMLIKRFGDTKAKQRLCLITDAQHLLRDPPQGTKEDQVDTIADQMKRRATKMGCIVFREAGVQHNSVICENDRLLYHFRDRSVAKVVQVDTPTALLGALKTRNVLPVTIFRGDLEVNSTFKIKVWAYKKTSEEKFPTLKKYSDKAPPSDQFASHEVKVDYEYKSILEPDTVVPPDQRIKGYLYGPQVVPISSAEWEAVKFKPEKGVKLLGFADRSSVPRSYFMKDVNSFVPEPGNTKAIVAVSALARAMQDMNKVAILRCVWRQNQANVAFGVLTPNISSVNNVPDSFYFNILPFAEDVRDFPFRSFSSLPPSSQPTEEQQEAADNLVKMLDLAPPGREEILRPDFTPNPMLERFYSYLDLKSKQPDANPPPLHSCLRRITEPDPDVINYRAPLIQNLGKAFDLKENPKRKKARTQERLAYAGPDDQAKKSEDDAGKAMAIDDQAKDAEKARAIEVLFPSTEKVGKIGDVNPVKDFEAMLAERSSSTWVQKAMEEMKKYTTALIENSPQGDYYEKALECFVALRKACIIEQEPEEYNQFVTKLYERLKKVDDVVKFFQLLSSKNVLLICKEEAPDSDVTEEMARSFFLKTEISSE

SEQ ID NO: 103 - DNA, 2328 bp, Triticum aestivum
gaaccgtcgccgtcgcacgcgccgccggccgcgccgcgagcccgatttccccacgccccgcggcatggcgcgcaacaaggaagggctggttctgctgctggatgtcggcccgtcgatgcaccgggcgctgccggaggttgagaacgtctgcacgaccctcgtgcgcaagaagctggtttttcataggagcgacgaggttggcgttgtcctgtttggagctaaagaaacacacaatgacctcgcgagggaacttgggggctataagcatgtgctggttaagcatgatattaaagttgttgacgaagaaacaaaagatgctcttgaaaatcttcctaggggaactgcccctggtgactttctggatgctattgttgttggtttggatatgctgataaagagattcggagataccaaagcaaaacaacgtctgtgtctaatcaccgacgcacaacatctgctaagggatccaccccaagggacaaaagaagaccaggtggacactattgcagaccagatgaaaaaacatgatattaagatggattgcattgttttcagggaatctggagttcaacacaattctgtaatggatgaaaatgaccggttattatatcacttcagagataggtcggtggcaaaggtagtccaggttgacaccccgacagcactcttaggtgctctcaagacaagaaatgtactcccagttactatcttcaggggagacctggaagtgagctccacttttaaaatcaaggtgtgggcgtataagaaaacatctgaggaaaaattccccactttgaagaagtattctgataaggctcctccaagtgatcagtttgcctcgcatgaagtcaaagtggattatgagtacaaaagcattctagaaccagacacagttattccaccagatcaaagaatcaagggctatctttacggtcctcaagttgttcctatatcatctgctgaatgggaggctgtgaagttcaagccagagaaaggtgtgaagcttctaggttttgcagataggtccagcataccacggtcctattttatgaaagatgtgaactcctttgtacctgaaccgggaaacacaaaagcaatggttgcagtctctgccttagctagagcaatgcaagaaatgaacaaggttgcaattctgcgatgtgtgtggaggcaaaatcaagcgaatgttgcttttggtgtattgacaccaaacatctcatcagtgaacaatgtgccagattccttttacttcaatatactgccttttgctgaggacatcagagactttccatttcgctccttcagcagcctgccaccatcatcacagcctactgaagaacagcaggaagcggcagataatctagtgaagatgttagatcttgcaccacctggaagggaagagatcctcaggcctgatttcacaccaaaccctatgttggagaggttctacagctaccttggtctgaagtcaaagcagccagatgcaaatccaccaccgctcgatagctgtctaaggaggataaccgagccagatcctgacgtcattaattatcgagtaccgttaatccaaaatttaggcaaatcttttgagctgaaggagaaccccaagagaaagaaagcccggacacaggagagattagcttatactgacccagatgatcaagctaaaagttcagaaaataatgcagagaaggctacggcggcagatggtcaagctaaaaagccagaagatccttatgcagagaaggctagggcgatagaggttatgtttccttcaacagagaaggttgggaagattgaagatgtaaatcctgttaaagattttgaagccatgctggcagagagatctagctcaatatgggttcagaaggcaattgaagagatgaagaagtacacgaccaatttggtagagaattctcttcaaggagattattacgaaaaggcactcaagtgttttgttgctctgcggaaggcctgtataatcgaacaggagccggaggaatataaccaatttgtgacgaagctttatgagagactgaagaaggtggatgatgtggtgaagttctttcagcttctttcatccaagaatgttttgcttatatgcaaagaagaagcgcctgacagcgatgtgactgaagagatggcgaggagcttcttcttgaaaaccgaaatatcctctgagtagcatgggtctgggtcctcaaggcattgccagtagaaaattctaacatcagtttagctgtaccacggctcatggttcatgttctgaagctttggtcatgatatggtatttgatacgatggtgtgccacagaagttgcgatgaaca

SEQ ID NO: 104 - protein, 706 aa, Triticum aestivum
MARNKEGLVLLLDVGPSMHRALPEVENVCTTLVRKKLVFHRSDEVGVVLFGAKETHNDLARELGGYKHVLVKHDIKVVDEETKDALENLPRGTAPGDFLDAIVVGLDMLIKRFGDTKAKQRLCLITDAQHLLRDPPQGTKEDQVDTIADQMKKHDIKMDCIVFRESGVQHNSVMDENDRLLYHFRDRSVAKVVQVDTPTALLGALKTRNVLPVTIFRGDLEVSSTFKIKVWAYKKTSEEKFPTLKKYSDKAPPSDQFASHEVKVDYEYKSILEPDTVIPPDQRIKGYLYGPQVVPISSAEWEAVKFKPEKGVKLLGFADRSSIPRSYFMKDVNSFVPEPGNTKAMVAVSALARAMQEMNKVAILRCVWRQNQANVAFGVLTPNISSVNNVPDSFYFNILPFAEDIRDFPFRSFSSLPPSSQPTEEQQEAADNLVKMLDLAPPGREEILRPDFTPNPMLERFYSYLGLKSKQPDANPPPLDSCLRRITEPDPDVINYRVPLIQNLGKSFELKENPKRKKARTQERLAYTDPDDQAKSSENNAEKATAADGQAKKPEDPYAEKARAIEVMFPSTEKVGKIEDVNPVKDFEAMLAERSSSIWVQKAIEEMKKYTTNLVENSLQGDYYEKALKCFVALRKACIIEQEPEEYNQFVTKLYERLKKVDDVVKFFQLLSSKNVLLICKEEAPDSDVTEEMARSFFLKTEISSE

SEQ ID NO: 105 - DNA, 2570 bp, Oryza sativa
aagtcgccattcgtcttctctctctctctctccgcgccggcaaagcggccggtggcggcgccgacgagtcagcaagcggcagcgcggaagtcgacggccgcgagagtgggaggcggccggtcggtgatcgagtgcggaagtcttggtgaaggcccaccgcgtcgcgtccgtgtcctcctcgagccgcgtcgtcgtcgacctccttcaattccctcatggctcgcaacaaggaagcattggttttgctattggatgttggcccatccatgcatggcgttctgcaagaagttgagaatatctgctccacccttgtgcataagaagctagtttataataggagtgatgagatcggtgttgtcctttttggaactaaagaaacaagcaacgaactcgccaaggagcttgggggctataagcatgtggtggttgctcgtgatattaaagttgttgatgaagaaacaacaaatgctctgcaaaaccttccaaggggaacttcccctggtgactttttggatgctattgttgttggtttggatatgctgataagaaaatttggaaatatcaaaggaaaacagcgtatgtgtctagtcactgatgcacaacatccattaagagatccaccccaagggacaaaaaaggatcaggtggacactattgcagaccagatgaaaagacacgaaatcaagatggactgcattattttcagagaatctggagttcgtcacaatgctgtaatggatgaaaacgaccaattattataccacttcagagagaggtcagtaacaaaggtagttcatgttgacagcccaacgtcactcttaggtgctctcaggactagaaatgtacttccagttactgtcttcaggggagacttggaagtgagctctagctttaaaataaaggtgtgggtctataagaaaacatctgaggagaaattccccactttgaagaagtattctgataaggctcctgcaagtgataaatttgcatctcatgaagtcaaagtggattatgagtacaaaagtgttctagaaccagacacagtcgttccaccagatcaaagaattaaaggatatctttatggtccacaagttgttcctatatcatccgctgaatgggaagctgtcaagttcaaacctgagaaaggtgtgaagcttctaggttttacagatagatccagcatatctcggcactattttatgaaagatgtgttctcctttgttccggaaccaggaaacacaaaagcagttgctgccgtttctgccttagctagagcaatgagtgaaatgaacaaggttgcaattttacgatgcgtgtggaggcaaggtcaagggaatgttgctttgggtgtattgacaccaaacatatcatcagcaaaaaatgttctggattccttttacttcaatatacttccatttgctgaggacatcagagagtttcagtttcggtccttcagcagcctgccatcatcatctcagcctaccaaggaacagcaggaagctgcagataacctggtaaagatgttagatcttgcaccacctggaagggaagagatccttaagcctgatttcactccgaatcccatgttggagagattctacaggtaccttgatctcaagtcaaagcagccggatgcaaatgtcccacccctcgacaaatgtctaaagaagataactgaacctgatcctgatgtcattgattatcaagcaccgctaataaaaaaattaggcaatgtatttgagctgaaggagaaccccaagaaaaagaaagcacggacacaggacagattgacttatactggcgcagacgatcaggctaaattattagaagaaccttctgcagagaaggttggggtttcggaagctttatatcctccaaaaaagaaggctggggagattggcgatcataatcctgttcaagattttgaagccatgctgacacagagatctagctcaacgtgggttcagacggcaattgaagagatgcagaagtacataaccgctttaatacaggattcctgtgatcgggataatcaccaaaaggcactggagtgccttgttgctttacggaaggcctgcattattgaacaggaaccaaacgaatacaatggattcgtaacaaagctctgtcagaaatttaggccggctggtgataaaatttttttgcagcttctttcgtccaagaaagcttcgcttataagcaaagaagaagcacctgatagcgatgtgacggaagagatggcgagaaacttctgtctgaaacccgagccgtcctctcagtagccgagactgcaggcatggatgtggatggctttgagttctgaaggcctggaagctaggtaaaagaggaactggaagacatcgaacggccctagtactaatttctaacgtacgcctggttaaaatgttatgtagctcggtttttggaaagctctgtgtcatgtgagtgatgagcaacacgagctactattgttttcgaatggatatgtatgttgggatggaaaaatcccagatgaaatgtaaaagacttgcagtttgagatgtcccaagctccaagacttcaattcctca

SEQ ID NO: 106 - protein, 688 aa, Oryza sativa
MARNKEALVLLLDVGPSMHGVLQEVENICSTLVHKKLVYNRSDEIGVVLFGTKETSNELAKELGGYKHVVVARDIKVVDEETTNALQNLPRGTSPGDFLDAIVVGLDMLIRKFGNIKGKQRMCLVTDAQHPLRDPPQGTKKDQVDTIADQMKRHEIKMDCIIFRESGVRHNAVMDENDQLLYHFRERSVTKVVHVDSPTSLLGALRTRNVLPVTVFRGDLEVSSSFKIKVWVYKKTSEEKFPTLKKYSDKAPASDKFASHEVKVDYEYKSVLEPDTVVPPDQRIKGYLYGPQVVPISSAEWEAVKFKPEKGVKLLGFTDRSSISRHYFMKDVFSFVPEPGNTKAVAAVSALARAMSEMNKVAILRCVWRQGQGNVALGVLTPNISSAKNVLDSFYFNILPFAEDIREFQFRSFSSLPSSSQPTKEQQEAADNLVKMLDLAPPGREEILKPDFTPNPMLERFYRYLDLKSKQPDANVPPLDKCLKKITEPDPDVIDYQAPLIKKLGNVFELKENPKKKKARTQDRLTYTGADDQAKLLEEPSAEKVGVSEALYPPKKKAGEIGDHNPVQDFEAMLTQRSSSTWVQTAIEEMQKYITALIQDSCDRDNHQKALECLVALRKACIIEQEPNEYNGFVTKLCQKFRPAGDKIFLQLLSSKKASLISKEEAPDSDVTEEMARNFCLKPEPSSQ

SEQ ID NO: 107 - DNA, 2650 bp, Glycine max
ctgatccccagccccctaaaacaatttttcttttctcacaaaaatttctgtattggtgggacctttgagttttgaagcgggaagaccgaagatgaacgaagcagcaacttacatataagtaacgctccttcttctacaagcttctctctctgtctctcactctctctctctctctgccttttccacccatggctcgaaacaaggaagcgttgcttttgctgcttgatgtgggcccgtcaatgcatcccgctctttctgaaattgagaaagtctgctccatgcttgtgcataagaagctgatctatagcaaatatgatgaagtgggaatagtcttatttggaactgaagacactaataatgagcttactacggaagtgggtgggtatcaacatgttgtggttttgaaaaatattaaagttgtggatggagatattgttgaggctttacaacaactgcctcgaggaacaactgatggtgattttcttgatgctgtcattgttggcatggatgtgttagtaaaaaaatttggagtaacaaacaagggaaagaaacgtgtgtgtcttattacaaatgcacaatgtcaaataaaagaatctgatgaaggaacaaaggaagagcaagttaccaccattgccaaacaaatgactgcccatggtataaaaatggaaagtataattatgagaggaaagcttagtcaagatgcaaacaagggaataatggatgagaatgatcgcttgttaaatattttttcaaaggaaacatcaacaagattgttgtatgtggagaatccaatttctttgtttggtgctcttcgaacaagaaatatagctctggttacagttttcagagggcatcttgaaatcagtccaaaactgagcattaaggtaatggtatacaagaaaacaactgaagagaaatttccttctatgaagaaatattctgataaggctcctccaaatgataaatttgctaaacatgaagtcaaaatagattatgaacacaagagttctaaagatcctgacaaagttgtcccccctgaccaaagaattaaaggctatccttatgggcctcaaatagttcccatatcctctgctgagtgggaggctgttaaattcaaaccggaaaaaggtgtgaagctcatgggatttactgattcttctaatgtatttagacaccattacatgaaagatgtatatgttttcctacctgaacctggaaatacaagagccatgattgcagtttctgcagtagcaagggctatgaaggaaatgaataaggtggcaatagtacgttgtgtttggagacagggacaagcgaatgttgtcattggggtcttgacacccaatttatctgataaagaaaatattttttctgtgcagcctgattcattttacttaaatgtacttccttttgctgaggatgtgcgagagtttcaattcccttccttcactaatttcccagcatcgtggcaaccaaatggacaacagctagaggctgcagctaacttaataaaaacgcttgatcttgcaccacatgggcaagaggaagttttgctacctgactttacaccaaatccagtgttagagcgcttttatcgttatcttgagctgaaatcaaaggatccagatgtggcagtacctcctcttgatggcacactcaagaaaattacagagcctgatactgacctgcttttgcaaaataaatctgaaatagactcattttgtaggtcttttgagctaaagggaaatcccttgaaaaagtcgaggcgtttattgggaggaaagagatctttttcaaatgatgaagaggttaaaggaaacattactgctcaaccagccaatctcaccggaaatgcatctgttaatgttgggaaaattggggatctgactcccgttcaatattttgaagccttgatttcacgcagagatagtccagattgggttgtaaaagccattaatgaaatgaaaaataaaatatttgacctggtggaggactcccatgaaggggataactatcctaaagcactggaatgtttagttgcacttcgcaagggttgcatccttgagcaggaaccggaacagttcaatgatttccttaaacatctatggaatttctgtcaagagaaaaacctccctagtttctgtgaatatcttgcttctaaggaactcaccttgatctccaaaacagaagctatagacagtgaaaatactgatgacaaagccagaaaaggtttcttggttaaatctgaaccaaaagttgattgattccatcactgtatgcgctgaaatatctgagagcttcattcttttgcctcagtaatgattagatatcttgtaaaaacatctgttttggaacaaaaatctaggaataccttgtaaattgtactcatactttaggataatgatatgtcaaaaccagactggagaagtatgatgcagttgcatggtagatgtttaagttggtttatatttcccaatttccctgaactaatgctatttcactccaatagcagggtttactgatggtccattgaattttggtcttttctgtatgtctgtatgtagttcaaccttaatgctgtataacaaattcatgtctacatctaggagccaccagaagttatgactatttctttgattagttccaaaca

SEQ ID NO: 108 - protein, 691 aa, Glycine max
MARNKEALLLLLDVGPSMHPALSEIEKVCSMLVHKKLIYSKYDEVGIVLFGTEDTNNELTTEVGGYQHVVVLKNIKVVDGDIVEALQQLPRGTTDGDFLDAVIVGMDVLVKKFGVTNKGKKRVCLITNAQCQIKESDEGTKEEQVTTIAKQMTAHGIKMESIIMRGKLSQDANKGIMDENDRLLNIFSKETSTRLLYVENPISLFGALRTRNIALVTVFRGHLEISPKLSIKVMVYKKTTEEKFPSMKKYSDKAPPNDKFAKHEVKIDYEHKSSKDPDKVVPPDQRIKGYPYGPQIVPISSAEWEAVKFKPEKGVKLMGFTDSSNVFRHHYMKDVYVFLPEPGNTRAMIAVSAVARAMKEMNKVAIVRCVWRQGQANVVIGVLTPNLSDKENIFSVQPDSFYLNVLPFAEDVREFQFPSFTNFPASWQPNGQQLEAAANLIKTLDLAPHGQEEVLLPDFTPNPVLERFYRYLELKSKDPDVAVPPLDGTLKKITEPDTDLLLQNKSEIDSFCRSFELKGNPLKKSRRLLGGKRSFSNDEEVKGNITAQPANLTGNASVNVGKIGDLTPVQYFEALISRRDSPDWVVKAINEMKNKIFDLVEDSHEGDNYPKALECLVALRKGCILEQEPEQFNDFLKHLWNFCQEKNLPSFCEYLASKELTLISKTEAIDSENTDDKARKGFLVKSEPKVD

SEQ ID NO: 109 - DNA, 2497 bp, Solanum tuberosum
aagaaaaaggggagccaacgtgtgaattccccctttcttgaattttcaaatacttaattggagaagcactatgtgaaaattccagtgcaagttttgagaaactgcgaagtattcaactaagggcgcgggaagaagaagaaccaaacagccctgaacgttcatttcccttctaatggcccgtaataaggaagcggtagtgttggtaattgatgtgggtccttccatgcactcagttttacctgagattgaaaaagtttgctcattgttgatacagaagaagctggttttcagcagatatgatgaagtggggtttgtcttgtttggaactgcagataccaagaatgaattgaaagaggaaataggaggatatgaacatgtgacagttctgcgaaatatcaaagttgtagatgaagatcttgttgatgctctggaaaaacttccacgaggaagtgttcctggagattttcttgatgcgattgttgttggtatggacatgctcattaagaagtttggacaaaccaacaaggcaaagaaacgtctttgccttattacaaatgctgtttctctcatcaaagatccatttgaaggaacaaaggaagatcaagtaaacaccattgctacacagatgacagcacaaggcatgaagatggactgtgtaattgtcagaatgaaacaagattgggaaacaagtaggagaattatggaagaaaatgattttctaatgtcagtattctcgaataaatcttcctcaaaagtagtatatgtggaaagtccaacttctttattaggtgcacttagaacgcgtaatatatcgccagtcacgatatacagaggtgattttgaaattggtgcccaattgaagatcaaggtatgggtttacaagaaaacatctgaagagaagtttcctaccctgaaaaagtactccgataaggctccttccactgataaatttgctactcatgaaatcaaggttgattacgaatataaaagcatagaagaccctaataaagttgtgccaccagaacagaggattaaaggttttcagtatggacctcaagtagttcctatatcctctgctgagttggaggctgtaaagttcaaaccagagaaaagtgtgaagctactaggattcacagatgcttcaaacgtaatgcggcattactacctgaaagatgtaaatatcttcatagccgaacctggcaacaaaaaagccatccttgcactttctgctttggcaagggcaatgaaggaaatgaacaaagtagcaattgtccgatgtgtatggaggcaaggacagggtaatgttgttgttggggtccttacaccaaatgtctctgacaaggatattactcctgattcattttacttcaatattcttccctttgctgaggatgttcgggagtttcagtttccttctttcagcaatctgccttcatcaatgcagccaaatgaaaagcaacaagacgcagcagataaattggttcagatgttggatcttgcaccacctggaaaacaggaagtgttaccacctgactttacacctaatcctgttctagagcgttactaccgctatcttaacctgaagtcaaagcatccagatgctgctgttcctccacttgatgaaaccctcagaaagataacagaacctgatgttgagcttctttctcgaaacaagtccatcatagaggaactccgtaggtcttttgaactaaaagataatccaaagctgaaaaaatcagcaagaagaataaaagagagaccttcaggatcagatgaggaaagaggagagttcgacaaagatgctgatgtcaaagctatagactcaatggaatactcagccaaaacagaagttgagaaagttggagacgttaatcctgtcaaagactttgaggagatgatgtctcgaagagataatccaaaatggattagtaaggccattcagggtatgaaaaataagatctttgatcttgtggagaattcttgtgaaggagatacatttcataaagcattgcaatgtttagtggctctacgcaaaggttgtatccttgagcaggaaccaaagcagttcaatgatttcctgtgccacctgtctaaattttgccaagaaaaagacctgagaagtttctgtctatatctcacatctcatgaattcacttttataaccaaggcagaagctccagacagtgaaattccagaacacgaggctagaagctttatggtcaagcctgaacttgactcgcaaaatatgaaatcagaggctaaagcagaggatgatattatgagtatatacctgggtgggaagtagaaaaggaaacctagagatgcatgttgtgtgatgtacaggcaatcagcattttcagcaagaatgacagtgtaaacttaaagagatcttatttttgaggtttctgttgaagattgaatcttagacctcaatcagcttcattttgttactccatcctcaagttgtttgtttggttgttcaaaggcctttctttta

SEQ ID NO: 110 - protein, 710 aa, Solanum tuberosum
MARNKEAVVLVIDVGPSMHSVLPEIEKVCSLLIQKKLVFSRYDEVGFVLFGTADTKNELKEEIGGYEHVTVLRNIKVVDEDLVDALEKLPRGSVPGDFLDAIVVGMDMLIKKFGQTNKAKKRLCLITNAVSLIKDPFEGTKEDQVNTIATQMTAQGMKMDCVIVRMKQDWETSRRIMEENDFLMSVFSNKSSSKVVYVESPTSLLGALRTRNISPVTIYRGDFEIGAQLKIKVWVYKKTSEEKFPTLKKYSDKAPSTDKFATHEIKVDYEYKSIEDPNKVVPPEQRIKGFQYGPQVVPISSAELEAVKFKPEKSVKLLGFTDASNVMRHYYLKDVNIFIAEPGNKKAILALSALARAMKEMNKVAIVRCVWRQGQGNVVVGVLTPNVSDKDITPDSFYFNILPFAEDVREFQFPSFSNLPSSMQPNEKQQDAADKLVQMLDLAPPGKQEVLPPDFTPNPVLERYYRYLNLKSKHPDAAVPPLDETLRKITEPDVELLSRNKSIIEELRRSFELKDNPKLKKSARRIKERPSGSDEERGEFDKDADVKAIDSMEYSAKTEVEKVGDVNPVKDFEEMMSRRDNPKWISKAIQGMKNKIFDLVENSCEGDTFHKALQCLVALRKGCILEQEPKQFNDFLCHLSKFCQEKDLRSFCLYLTSHEFTFITKAEAPDSEIPEHEARSFMVKPELDSQNMKSEAKAEDDIMSIYLGGK

SEQ ID NO: 111 - DNA, 2698 bp, Solanum lycopersicum
attcttaattaaatgtcacgattggagtcaagtcagtaatcaaagagatacaaaactataagttttataacttatggggaaagaagagacttaacaagaaaaaggggagccgacgtgtgaattctccctttcttcaattttcaaatactaaattggagaagcactatgtgaaaattccagtgcaagttttgagaaactgccaagtattcaactaagggcgcgggaagaagaagaaccaaacagccgtgaacgctcatttcccttctaatggctcgtaataaggaagcgttggtattggtaattgatgtgggtccttccatgcactcggttttacctgagattgaaaaagtttgctcattgttgatacagaagaagctggttttcagcagatatgatgaagtggggtttgtcttgtttggaactgcagacaccaagaatgaattgaaagaggaaataggaggatatgaacacgtgacagttctgcgaaatatcaaagttgtagatgaagatcttgttgatgctctgcaaaaacttccacgaggaagtgttcctggagattttcttgatgcgattgttgttggtacggacatgctcattaagtttggacgaaccaacaaggcaaagagacgtctttgccttattacaaatgctgtttctcgcatcaaagatccatttgaaggaacaaaggaagatcaagtaaacaccattgctacccagatgacagcacaaggcattaagatggactgtgtaattgtcagaatgaaacaagatcgggaaacaaataggagcattatggaagaaaatgattttttaatgtcagtattctcgaacaaatcttcctcaaaagtagtatatgtggaaagtccaacttctttattaggtgcacttagaactcgtaatatatcgccagtcacgatatacagaggtgatcttgaaattagtgcacaattgaagatcaaggtgtgggtttacaagaaaacatctgaagagaagtttcctaccctgaaaaagtactccgaaaggactcctaccactgataaatttggtgctcatgacatcaaggttgaatacgaaaataaaatcatagaagaccctaataaagttgtgccaccagaacagaggattaaaggttttcagtatggacctcaagtagttcctatatcctctgctgagttggaggctgtaaagttcaaaccggagaaaagtgtgaagctactaggattcacagattcttcaaacataatgcggcattactacctgaaagatgtaaatatcttcatagccgaacctggcaacaaaaatgccatccttgcactttctgctttggcaagggcaatgaaggaaatgaacaaagtagcaatcgtccgatgtgtatggaggcaaggccaaggtaatgttgttgttggggtccttacaccaaatgtctctgacaaggataatactcctgattcattttacttcaatattcttccctttgctgaggatgttcgggatttccagtttccttctttcagcaatttaccttcatcaatgcagccaaatgaaaagcaacaagacgcagcagataaattggttcagatgttggatcttgcaccacctggaaaacaggaagtgttatcacctgacttcacacctaatcctgttctagagcgttactaccgctatcttaacctgaagtcaaagcacccagatgcagctgttcctccacttgatgaaaccctcagaaagataacagaacctgatgttgaacttctttctcaaaacaagtccatcatagaggaactccgtaggtcttttgaactaaaagataatccaaagctgaaaaaatcagcaagaagaataaaagagagaccttcaggatcagatgaggagatagaagaattcaacaaagatgctgatgtcaaagctatagactccatggaatactcagccaaaacagaagttgagaaagttggagatgttaatcctgtcaaagactttgaggatatgctgtctcgaagagataatccaaaatggattagtaaggccattcaggatatgaaaaataggatctttgatctcgtcgaaaattcttgtgacggagatacatttcataaagcattgcaatgtttggtggctctacgcaaaggttgcatccttgagcaggaaccaaagcagttcaatgatttcctgtgccacctatctaaattttgccaagaaaaagacctgagaagtttctgtctatatctcacatctcatgaaatcactttgataaccaaggcagaagctccagacagtgaaatttcagaacatgaggctagaagctttatggtcaagcctgaacttgactcgcaaaatatgaaatcagaggctaaagcagaggatgatattatgagtatatacctgggagggaagtagaaaaggaaacccagatagatatgcatattgtgtgatgtacaggcaatcagcattttcggcaagaatgataatgtagacttgaaaagatctttttttgaggcttctgctaaagattgtatcttagacctcaatcagcctcattatgttactccatcctcaagttgtttgtttggtcattcaaaggcttctcttttatttgcttatctttgtcatgtctaaacctattctatagatgtctctatgtccatgcctgttgctagcagggtggtaggtattaagaaggtataacttatgcagtaaa

SEQ ID NO: 112 - protein, 709 aa, Solanum lycopersicum
MARNKEALVLVIDVGPSMHSVLPEIEKVCSLLIQKKLVFSRYDEVGFVLFGTADTKNELKEEIGGYEHVTVLRNIKVVDEDLVDALQKLPRGSVPGDFLDAIVVGTDMLIKFGRTNKAKRRLCLITNAVSRIKDPFEGTKEDQVNTIATQMTAQGIKMDCVIVRMKQDRETNRSIMEENDFLMSVFSNKSSSKVVYVESPTSLLGALRTRNISPVTIYRGDLEISAQLKIKVWVYKKTSEEKFPTLKKYSERTPTTDKFGAHDIKVEYENKIIEDPNKVVPPEQRIKGFQYGPQVVPISSAELEAVKFKPEKSVKLLGFTDSSNIMRHYYLKDVNIFIAEPGNKNAILALSALARAMKEMNKVAIVRCVWRQGQGNVVVGVLTPNVSDKDNTPDSFYFNILPFAEDVRDFQFPSFSNLPSSMQPNEKQQDAADKLVQMLDLAPPGKQEVLSPDFTPNPVLERYYRYLNLKSKHPDAAVPPLDETLRKITEPDVELLSQNKSIIEELRRSFELKDNPKLKKSARRIKERPSGSDEEIEEFNKDADVKAIDSMEYSAKTEVEKVGDVNPVKDFEDMLSRRDNPKWISKAIQDMKNRIFDLVENSCDGDTFHKALQCLVALRKGCILEQEPKQFNDFLCHLSKFCQEKDLRSFCLYLTSHEITLITKAEAPDSEISEHEARSFMVKPELDSQNMKSEAKAEDDIMSIYLGGK

SEQ ID NO: 113 - DNA, 2588 bp, Sorghum bicolor
tattaatctcttccttcctcggcactcctcggcgccggccgcgaaaaagcgtctcctcttcctcttgttcccctcgccgccgccgtcctcgtctcgcacccggctgctcctccccggctggccggctccccccaccgggcccgcccttggcttgagttgaggtactcgaccgtcagtcaacttctgcagcttaccccaggcttcgagcgggttttcatggaggcagcagcataaaccctcgtcggctcttcctctctctctgccgcgcggcaagtccccctccgctgccttcgccatggctcgcaacagggaagtagtgattttgctgttggatgttgggccttcgatgcatggggtgctgcaagaggtcaagaacatatgctcgactcttgtgcataagaagctagtttataacaggagcgatgaagtcggtattgtcctctttggaactaaaggaacatgcaatgagcttgcaaaggagcttgggggctataagcatgtgacagtcacacgtgatattaaagttgtagatgaaggggcggcacaggctctgcaaaaccttccattaggatctgcccctggtgattttctggattctattgttgttggcttggatatggtgatgaggaaatttggtaataccaaagggaagcggaggctctgtttaatcaccagtgcacaggatttattaagagatccgcccgaggggactaaagaagaacaggtggacaccattgcagacatgttgaaaaaacacagtatcaagttggagtgcattatctttagagaaccgggagtgctccgtaatgctgtaatggaagaaaacgaccgattattgtatcagttcagaaatagatcagttgcaaaggtagttcaggttgacagcccaacatcactgttgggtgctctcaagacaagaaatgtgcttccagttaccgtcttcaggggagacctggaagtgaactccaattttaaaattaaggtgtgggtctataagaaaacagctgaggagaaattccccactttgaagaagtattcggacaaggctcctccaagtgataaacttgcctctcatgaagtcaaagttgattatgagtacaagagcgttgtcgaaccagacaaaattgttccaccagaccagaggattaaggggtatctttatggtcctcaagttattcctgtatcaaatgctgaatgggaggcagtcaagttcaagccagagaaaggtgtgaagcttctaggatttacagatagatccaacgtaccacggcaccattttatgaaagacgtatgcttgtttatacctgaaccaggcaacattaaagcaactcttgcagtttctgccatagcaagagcaatgcatcaaatgaacaaggctgctattgtgcgatgtgtgtggagacaaggtcaagggaatgttgctcttggtgtattgacaccgaatatttcagcagtggacaatgtccaagattccttttacttcaatgtactcccatttgctgaggacatcagagagtttcagtttcgatcctttagcagcctgccatcatcatctcagcccactgaagaacaacaagaagctgcagataacctagtgaagatgttagacctagcaccacctggaagagaggtcctcaagcctgagtttacaccaaaccccatgttggagagattttacagttaccttgatctcaagtcaaagcagccagatgcaaatgtaccaccacttgatagatctctaaggaggataactgaacctgatcctaatgtggttggccaacaaacacaattaatacagaatttaggcaaagcttttgagctgaaggagaaccccaagaaaaagaaagcacgaggacaggacatattggcatataccggtgcaggtgatcaagctaaatctgtagaagagccttctgtagagaaggacagagttctggaaaatacacatccacctacagagaatgttggggcgatcagagattcgaatccagttcacgattttgaggccatgctggctaatagatctagctcaacttgggttcagaaggctattgaagatatgcagaattacacagcagctttgttacaaaagtctcatgatgggagtaactaccaaaaggcacttgaatgttttgctgctctgcggaaggcctgcattattgaacaggaaccacaggaattcaacgaattcctaacaaagatttacgagagattgaaggagggtgatgctgccaagttctttcaacttctctcctcaaaaaatatttcacttatcagcaaagaggaagcgcctgacagcgacgtgactgaggagatggcaaaaagtttctacctgaaacgagaaaaggcgtctcagtagcagctggaagaaactggaagcgccttgggcttttgggtttggagatcaccggaccggggttgtgaaactgtcctaactgtagcttagcctagcccgttgcatgtgtatgggcatgttttgaggctttgttcgtggatggaacttgaactaatactcaaactctctggatttagctgcacaatctgttggtgttgccgtgttggtgctttattatactgtgtttcgagta

SEQ ID NO: 114 - protein, 687 aa, Sorghum bicolor
MARNREVVILLLDVGPSMHGVLQEVKNICSTLVHKKLVYNRSDEVGIVLFGTKGTCNELAKELGGYKHVTVTRDIKVVDEGAAQALQNLPLGSAPGDFLDSIVVGLDMVMRKFGNTKGKRRLCLITSAQDLLRDPPEGTKEEQVDTIADMLKKHSIKLECIIFREPGVLRNAVMEENDRLLYQFRNRSVAKVVQVDSPTSLLGALKTRNVLPVTVFRGDLEVNSNFKIKVWVYKKTAEEKFPTLKKYSDKAPPSDKLASHEVKVDYEYKSVVEPDKIVPPDQRIKGYLYGPQVIPVSNAEWEAVKFKPEKGVKLLGFTDRSNVPRHHFMKDVCLFIPEPGNIKATLAVSAIARAMHQMNKAAIVRCVWRQGQGNVALGVLTPNISAVDNVQDSFYFNVLPFAEDIREFQFRSFSSLPSSSQPTEEQQEAADNLVKMLDLAPPGREVLKPEFTPNPMLERFYSYLDLKSKQPDANVPPLDRSLRRITEPDPNVVGQQTQLIQNLGKAFELKENPKKKKARGQDILAYTGAGDQAKSVEEPSVEKDRVLENTHPPTENVGAIRDSNPVHDFEAMLANRSSSTWVQKAIEDMQNYTAALLQKSHDGSNYQKALECFAALRKACIIEQEPQEFNEFLTKIYERLKEGDAAKFFQLLSSKNISLISKEEAPDSDVTEEMAKSFYLKREKASQ

SEQ ID NO: 115 - DNA, 2765 bp, Beta vulgaris
tccaaaaacgctcacggtgccggtgcccaactcataagcaaattgaattcctttagaacctctggaatctggaacctctcatatgtcatacgcaaagctcgaattgcagaagctcgttccagggaggatgtaagccataccttaagagtgcttgtagcaacagattgccacttaggttacttggagaaggatgagatacggaggcatgactcattcgaatcttttgaagagatatgttcgattgcagagaaaaaacaggtggacttcatacttcttggtggtgatctctttcacgaaaataagccatcaaggtctacattggtgagggctgtggagatccttcgtcaatactgcctcaatgatcacccagtgcagtttcaagttgttagcgaccagactttgaacttcgcaaacagatttggtcatgtaaattatgaagaccctcactacaatgtcggcctgcctgtgttcacaattcatggcaatcatgatgatcctgctggagtggacaatctatctgctgttgatattctttcagcgtgcaatcttgtcaattattttggtaaaatggatcttggggggtctggggttggccagatttctgtttaccccattctcgttcggaagggttccacatctgtggctctatatggccttggaaatattcgggatgaaagactaaacagaatgtttcagactcctcatgctgtccagtggattcgccctgaagaacaagaaggatgtcaagtttcggattggttcaatatccttgttcttcaccaaaatagaattaaaacaaatcctaaaaatgctataaatgagcattttttaccgcaattccttgattttgtagtttggggacatgagcatgaatgcctaattgaccctcaggaagttcctggaatgggttttcatatcacacaacctggttcttctgttgcaacatcacttattgatggggaagcaaagccgaagcatgttcttctcttagaaattaagggtaatcaatatcgcccaaccaaaatacctctgcaatcagtgaggccttttgaatatgcagaggttgcattgaaagatttacctgatattgatcaaagtgatcagaattcaattcttgagcatttggatgaagtggtcagaaatttgattgagaagtgtaacaaaaaggcggtcaacaaagctgaagcaaagcttccactggttcgagtaaaggtagattactcaggatttatgactataaatcctcagagatttggacagaaatatgttggcaaggtggcaaatcctcaggacattttgatattctcaaaggcttcacgggttaagaatcgaactgaagggaaaattgacgattctgagaaattccgaccagaagaattaaatcaacagaatatcgaggctttggttgcagaaagcaatctgaaaatggagatccttcctgtcaatgatctagatattgcactacataatttcgttagtaaagatgacaaattggctttccatgcttgcttgcaacacaatcttgacgaaacacgtagcaaaattgctgagggttcagactcagcgaagttcgaggaagaagacttgattgttaaagtcggagagtgtctggaggaacgtgttaaacaaagggcaacacacccgaaggagagtttcacctttagtgttcagtcagaggagtttaggggtaagcgcatggcaggaacaagaaatgcagcatcgtttagtgatgatgaagatgccacccagttatctggggctaaagcttctcgaggtagaaaagcgacagctacagcattaggttcctcatatgatgcttcagaaactggtaaagcttctacgagaggaaggggaaggggaagggggaggggaaaaggtgccacgactatgaagcaaacaactcttgactcatctttgggcttccgacgttctcaaagatcttcatcagttgccgcttcgggctcagttcgtagtattgcagatgatgatgaaaatgttgattctgcctcgagtgatgaagcagaggagtatgaagttcgggaggttcttgaaagctcgggtgacgatgaaagactccaaggaaaaagtcgcaaacgtgctgcaccaagaggtagggggagaggttccacacaggcctctaagagggggaaacaatcagggagctcttcacttcaaaaaatgctcatgggtaaagatgatgaagacgatgatgatgacgtaccgaaactttttaacaagtctcaaccgaaggtgacgagaaattatggagctttaaggcgataagaagatgcagtcatgcagactcccttaactaactcccgttgaagagagaccttgccaggagccatttctcaagaagtactatggaaattcggcaatgaatacagcgatcaagttggcgattttcccgttgaccaatgtataatacaattttgaagtttctgtaagatagctgatggaaattttcctgtaagtggttttcctgtaagtgaatgtataatacaattaaaggtcagaatcaattagcgtaggatatggtcatgtgttatttacccattaactttaactccagaattgggtacagttcatgtgttccctagaatagaaatgtgtgcagcttactccattgtctgagcttgttgccaaggttttgtagccgagtgtcaggttgtgaacttgtgatgtggagacactcatcagtttttccaaggctgagcactttatctactgtgaaatagaagatttttcatgaatcgttttatcaa

SEQ ID NO: 116 - protein, 760 aa, Beta vulgaris
SKNAHGAGAQLISKLNSFRTSGIWNLSYVIRKARIAEARSREDVSHTLRVLVATDCHLGYLEKDEIRRHDSFESFEEICSIAEKKQVDFILLGGDLFHENKPSRSTLVRAVEILRQYCLNDHPVQFQVVSDQTLNFANRFGHVNYEDPHYNVGLPVFTIHGNHDDPAGVDNLSAVDILSACNLVNYFGKMDLGGSGVGQISVYPILVRKGSTSVALYGLGNIRDERLNRMFQTPHAVQWIRPEEQEGCQVSDWFNILVLHQNRIKTNPKNAINEHFLPQFLDFVVWGHEHECLIDPQEVPGMGFHITQPGSSVATSLIDGEAKPKHVLLLEIKGNQYRPTKIPLQSVRPFEYAEVALKDLPDIDQSDQNSILEHLDEVVRNLIEKCNKKAVNKAEAKLPLVRVKVDYSGFMTINPQRFGQKYVGKVANPQDILIFSKASRVKNRTEGKIDDSEKFRPEELNQQNIEALVAESNLKMEILPVNDLDIALHNFVSKDDKLAFHACLQHNLDETRSKIAEGSDSAKFEEEDLIVKVGECLEERVKQRATHPKESFTFSVQSEEFRGKRMAGTRNAASFSDDEDATQLSGAKASRGRKATATALGSSYDASETGKASTRGRGRGRGRGKGATTMKQTTLDSSLGFRRSQRSSSVAASGSVRSIADDDENVDSASSDEAEEYEVREVLESSGDDERLQGKSRKRAAPRGRGRGSTQASKRGKQSGSSSLQKMLMGKDDEDDDDDVPKLFNKSQPKVTRNYGALRR

SEQ ID NO: 117 - DNA, 2500 bp, Zea mays
cccctgcctgcgtcgtctcctcccgttcacccctgtctcgtcgtggcgacgattggggaccctagcctcctacgcccaataccctaaacccttcccttgcagcacctgccactgccagtgcattagatttacagcaacggattggtttggccaacacgttgagttcaggttcaatgtctgaaccagcacaacctagtggaggggaaggtgatgtcaacacgctccgaatacttgtagcaaccgactgccatctaggctacatggagaaagatgagatacgtaggtttgattcctttcaagcatttgaggagatttgcgcattggcagataaaaataaggtggattttatacttctcggtggtgatctattccatgagaacaagccgtcacgctcaaccctggtaaaaacgattgagattctacggcgctactgcctaaatgatcaacctgtgaagttccaggttgtcagtgatcagacagttaactttccaaacaggtttggtaaggtaaattatgaagacccaaactttaacgttggtctgcctgtgttcaccattcatggaaatcatgatgaccctgctggagtggataatctctctgctatcgatattctttcggcttgcaatcttgtaaattattttggaaagatggaccttggtggctctggcgttggtcagatagcagtttatcctgtacttgtaaaaaagggcatgacttcagttgcactgtatggtcttggaaacattagagatgaacgactaaatagaatgtttcagacgcctcattcagtacagtggatgcgacctggaactcaagatggggagtcagcgtctgactggttcaatatattggtacttcatcagaataggataaagacaaaccctaaaagtgccatcaatgagcatttcttaccacgtttcctggattttattgtatggggccatgagcatgaatgtcttattgatcctcaggaggtccctggaatgggtttccacatcacacaaccaggttcatcagtcgcgacgtccctgattgatggtgaagcaaaaccaaagcatgttcttttgttagaaatcaagggaaatcagtacaggccaaccaaaatacctctgagatctgtcagaccttttgaatatgctgaggttgtgttgaaagatgaagcagatgttaactcaaatgatcaggactctgtgcttgaacatttggataaaattgtaagaaatctgattgagaagagtagccaaccaactgccagcagatcagagcccaaacttccattagttagaatcaaggtagattactctgggttttcaacaataaacccacaacgttttggtcagaagtatgttggaaaggtcgcaaaccctcaagatattctcattttctcaaaatcagcaaagaagcgccagactacaggagatcacattgatgattctgagaaacttcgtcctgaggaactaaaccaacaaacaatcgaagctctggtcgcagagagtaacttgaaaatggagattcttccggttgatgatttggacattgcgttgcatgattttgtgaacaaggatgacaagatggcattttattcatgtttgcagagaaaccttgaagaaaccaggaataagttgagttctgaagcagataaatccaaatttgaggaagaagatataatagtcaaagttggcgagtgcatgcaggaacgcgttaaggaaaggtctctgcactctaaggacggcacacgtttgacaacaggctctcacaacttggatactggaggtaaatcttttacagctcaaagcaaccagaactccttcagtgatgatgaagacaccagggagatgcttcttggtgcaagatcaactgatgttggacgaaaatcatctggatttactagaccctccaaagatactgctgatgttgctaaacgtggtacttccaaaagaggcaggggaagaggcaccagttcaatgaagcagaccactcttagtttcagccagtcaaggtcagctaccgttattcgtagtgaggatgtggcttcctctgaggaggaagcagatgcaaatgaagttgttgaaaattcagaagaggagagtgcgcaacaagttggacgtaaaagagcagctcctaggggtagaggtagaggtagaggcggaggttccactgcaaagagggggcgaaaaacagatattgcttccatgcaaaatatgatgagcaaagatgatgatgattcagaagatgaaccgccaaagaaaactcctcgggtcaccaggaactatggcgctgtcaggaggagatgaccctttaaggagttcttgctcatgagagttataggctaggtgttttgtcttgtaaagttggaagagccgacgtgtttttatcaaccttgacgtcgaccagtttgcgttgccgtgaactgactgtaccttgtacacgcccgaatgtaacggatttttgggatttatacatccttgtagctgcttaaattccaaaaaaaaaaaaaaaa

SEQ ID NO: 118 - protein, 706 aa, Zea mays
MSEPAQPSGGEGDVNTLRILVATDCHLGYMEKDEIRRFDSFQAFEEICALADKNKVDFILLGGDLFHENKPSRSTLVKTIEILRRYCLNDQPVKFQVVSDQTVNFPNRFGKVNYEDPNFNVGLPVFTIHGNHDDPAGVDNLSAIDILSACNLVNYFGKMDLGGSGVGQIAVYPVLVKKGMTSVALYGLGNIRDERLNRMFQTPHSVQWMRPGTQDGESASDWFNILVLHQNRIKTNPKSAINEHFLPRFLDFIVWGHEHECLIDPQEVPGMGFHITQPGSSVATSLIDGEAKPKHVLLLEIKGNQYRPTKIPLRSVRPFEYAEVVLKDEADVNSNDQDSVLEHLDKIVRNLIEKSSQPTASRSEPKLPLVRIKVDYSGFSTINPQRFGQKYVGKVANPQDILIFSKSAKKRQTTGDHIDDSEKLRPEELNQQTIEALVAESNLKMEILPVDDLDIALHDFVNKDDKMAFYSCLQRNLEETRNKLSSEADKSKFEEEDIIVKVGECMQERVKERSLHSKDGTRLTTGSHNLDTGGKSFTAQSNQNSFSDDEDTREMLLGARSTDVGRKSSGFTRPSKDTADVAKRGTSKRGRGRGTSSMKQTTLSFSQSRSATVIRSEDVASSEEEADANEVVENSEEESAQQVGRKRAAPRGRGRGRGGGSTAKRGRKTDIASMQNMMSKDDDDSEDEPPKKTPRVTRNYGAVRRR

SEQ ID NO: 119 - DNA, 2549 bp, Brassica napus
cttcgtcgtcgtctccctaaattggtccgtcattctctctttcgctctctgggctttaaagttcagttcactccgattctcactttcgtttccgtcggattctctctttctggtgaccggagttccgtcgctttactttattcctatcgaagacaaggtttacagaactgcaagcgcttgccatcaatcatgtctagagaggatttgagtgatactcttcggatacttgttgcaactgattgccacttgggctacatggagaaggatgaaataaggcgccacgattccttcaaggcttttcaagagatttgctctattgctgaggataaacaggtggacttcttactccttggaggtgatcttttccatgagaataaaccctctcgaactacgcttgttaaagccattgagattcttcgtcgccattgccttaatgataaacccgtccactttcaagttgtcagcgaccagactgtcaattttcaaaatgcgtttggtcatgtaaattatgaggatccacacttcaatgtaggcttgcccgtctttagtattcatggaaaccatgacgatccagctggagtggacaacctttctgcaattgatatcctctcagcatgcaacctcgtgaattattttggaaagatgaatcttggtggttcaggtgttggccagatttctctctaccctatacttatgaggaagggttcaacaactgtggctctctatggtttaggaaacatcagggatgaacgtctcaacagaatgtttcagaccccacacgctgtccaatggatgaggcctgaagttcaagaaggatgtgacgtttctgactggttcaatattctggtgcttcatcaaaatagggtgaaatcaaaccccaaaaatgcaataagcgagcactttcttcctcggttcctcgacttcattgtgtggggccatgagcatgaatgccttatcgacccccaggaggtatctggaatgggcttccacatcacacaaccaggatcttctgtggcaacatcactgattgatggggaatcaaagccaaagcatgttcttctcttagaaatcaagggcaatcaatatcgtcctacgaagatacctttgacatctgtgaggccttttgagtatacagagattgttttaaaggatgaagatgatattgatcccaatgatcaaaactcaattctcgaacacttggataaagtggtcagagatctaatagaaaaagcaagcaaaaaagctgtcaacagatcagatatccagctccccttggttcgaatcaaggtagattactctggatttatgacgataaatcctcaaagatttggacaaaaatatgtgggaaaggttgcaaatccccaggacattttaatattctccaaagcttctaagaaaggtcaacgcgaaggcaccatcgatgattctgagcggctccgtccagaagaactgaaccagcaaaatatagaagcactagtagctgaaagcaacctgaaaatggagatccttccagttaacgatcttgacgttgctcttcaaaattttgtgaacaaggatgataaactagctttctactcatgcgttcagtacaatcttcaagagactcgtggtaaacttgcaaaagattcagatgcccagaaatttgaggaggacgatctgattcttaaagtgggagagtgcttagaggaacgcttgaaagataggtcaactcgacccagtggttcctcacagtttttatccactggattgacatcagagaatttgacgaaaagaagcagtggcatcgcgaatgcttctttcagtgatgatgaagacacgactcagatctctggttcagtgcctgccactagaggacggagaggttcatccactggtacatctcgtggcagagctaaagccccaaccagaggaagaggccgaggcaaggcctcaagtgcgatgaagcaaaccactcttgatggttctcttggtttgcgccagtctcagagatctgcttcagcttccttcaaaagtgcttctaccattgtagaagacgatgtagattctccttcaagcgaagaagcagagcctgaagatcttaaccaagttgacagcagttcggaggaggaagagaacactagaggcaaaggacggaaaagacaagctactactaagagaggcagaggtagaggtacggtgacatcaaaacgtggtagaaaaaacgaaagctcttcttcacttcataggctgctcagtagcaaagacgaagacgaggacgaagatgatgaagatattgaaaagaagctaaacagatctcagcctcgggttacaaggaactatggagctctaagaagataaaatggcaagctctccgacgtcccagctcacaacgaagctttatagtgtgttctcttcatttgtagcgacttctcacgccaaataacgctgaaaagagcaaccaaacactgatgagtctttgtgaaatgtgtagtgagaattttgtagtgtactttttaccgtgctctttttgagttttgttgttgatcaatgaggaaatatattttatatca

SEQ ID NO: 120 - protein, 715 aa, Brassica napus
MSREDLSDTLRILVATDCHLGYMEKDEIRRHDSFKAFQEICSIAEDKQVDFLLLGGDLFHENKPSRTTLVKAIEILRRHCLNDKPVHFQVVSDQTVNFQNAFGHVNYEDPHFNVGLPVFSIHGNHDDPAGVDNLSAIDILSACNLVNYFGKMNLGGSGVGQISLYPILMRKGSTTVALYGLGNIRDERLNRMFQTPHAVQWMRPEVQEGCDVSDWFNILVLHQNRVKSNPKNAISEHFLPRFLDFIVWGHEHECLIDPQEVSGMGFHITQPGSSVATSLIDGESKPKHVLLLEIKGNQYRPTKIPLTSVRPFEYTEIVLKDEDDIDPNDQNSILEHLDKVVRDLIEKASKKAVNRSDIQLPLVRIKVDYSGFMTINPQRFGQKYVGKVANPQDILIFSKASKKGQREGTIDDSERLRPEELNQQNIEALVAESNLKMEILPVNDLDVALQNFVNKDDKLAFYSCVQYNLQETRGKLAKDSDAQKFEEDDLILKVGECLEERLKDRSTRPSGSSQFLSTGLTSENLTKRSSGIANASFSDDEDTTQISGSVPATRGRRGSSTGTSRGRAKAPTRGRGRGKASSAMKQTTLDGSLGLRQSQRSASASFKSASTIVEDDVDSPSSEEAEPEDLNQVDSSSEEEENTRGKGRKRQATTKRGRGRGTVTSKRGRKNESSSSLHRLLSSKDEDEDEDDEDIEKKLNRSQPRVTRNYGALRR

SEQ ID NO: 121 - DNA, 2606 bp, Helianthus annuus
taactttcatgaacgctaatggaccttttcgactttcagcccaaaaagaaacaaaacattttgcccgtgtgatttcgagtttcgacgtagaagactcgatctgcccttcaaattcccgccactgttccgccggtgttaccggaactccacggtacctgaattcatctggcgaccgatttatcctgccgggtttaacaaggtcaaactctagtgacatgggtgattcgtcaagggaggataatagcaacacggttcgcattcttgttgccactgattgtcatttgggatatatggaaaaagacgagattcgtcggcacgactcatttaaagcatttgaagaaatttgctccattgcagagcagaaaaatgtggacttcgtactacttggtggtgatctttttcatgaaaacaagccatcgaggacgacattagtgaaaacgatagagatcctacgtcgatattgtcttaacgataagccagtgcaattccaagttgtcagtgatcagactataaactttgcaaatgtgtttggtcatgtaaactatgaagatcctcatttcaacgttggtttgccagtgttcagtattcacggaaatcatgatgaccctgctggagtggataacctttctgcagtcgatatcctttcagcatgcaatcttgtaaactattttggaaaaatggttcttggaggttctggagtcgggcagatcactctctacccgattcttgtaaaaaagggttcaacttcggttgctctgtacggccttggaaatatcagagatgaacgtctgaatagaatgtttcagactccacatgctgtacagtggatgcgtcctgaacctcaagaagattgtcaagtgtccgactggttcaacattctagtacttcatcagaacagagtgaagacaaatcctaagaatgcgataaatgagcattttctacctcggtttctggactttatagtttgggggcatgaacatgaatgtcttgttgatcctcaggaagttccaggtatgggtttccacatcactcaaccgggctcttctgtcgcaacatcacttatcgatggagaatcaaaaccaaagcatgtgcttctcgtagaaattaagggaaatcaatatcggccaaccaagataccgctacattctgtaaggccttttgaatataaagaggtggtgttaaaggacgaacctgacattgacccaaatgatcaaaactcgattcttgagcatttggacaatgaggtaaacagtttaatagaaaagtgtagccgaagggatgctagaaagtcagagccaatgcttccacttatccgtttaaaggttgattattctggattcatgaccattaatcctcaaagatttggtcaaaaatatgtgggcaaggttgctaatccccaggatattcttatcttttcaaaagcttcaaagagagctcagggtgacgcaaaacttaaggacacggaacgacttcgaccagaagaactgaatcaacaaaacattgaagctttagttgctgagagtgaattgaaaatggagattcttcctgtgaacgatttagatgaagcattacagaattttatcaacaaagatgacaggatggctttttatacttgtttgcaatacaacattgaagaaacccgtaaaagtatttctcgggatccagaaaacataaaaagtgaagttgacgatataattgtcaaagtcgaaaactgcttagaggagcgtgtgaagggaagatccagatccaaagacgatcaactatttacatctagttctcaatccatagagaatatgataaataaagctcctgggggaattgggagtgcggtttcttttagtgatgatgaggataccacacaactttacgggtcaaagtcaactggcagaggtaaaaaagggtcattacaaccgtttaaatctgctcgcgatgtttctgctcctacaagaagaggggggagggggagaggtaggggatctaatagtttaaagcagacaactcttgatgcaactttcatgtcccgtcgctctgagagatcagcatcagttgctgcatcagcttcagttcaaagcatggcagccgatgaagagaacttagattctgattcagatgatgaaccggttcaatatggaataaatgagcttcgtgacagttcggatgataatgagagcatgcagcaaggtaagggtagaaaacgaggtgctacgaggggaagaggtagggggtccactgctgctaagaggggaagaaaatccgacaacacgtcatcctcaattcatcaaatgatgatgagtaaagatgacgatgacgacgacgatgatgatatgccaaagagaacgaacaagactcaaccaagggtgacaaggaactatggtgccttaaggaggtagcaagcataagcaagggtttgtctttttgtatgttttcgatgtacaatctagttcaggtatttccattttgatatgtagtgaacatgtctagccagtgtgtgtgaatttgtagcggaaaaagacgtgaacaatgtaaagctaaagtttgagtttgtttttgaaagctgtctgcatttagacatgaaatgctaatttgcagtggatgctttgaataaa

SEQ ID NO: 122 - protein, 793 aa, Helianthus annuus
MNANGPFRLSAQKETKHFARVISSFDVEDSICPSNSRHCSAGVTGTPRYLNSSGDRFILPGLTRSNSSDMGDSSREDNSNTVRILVATDCHLGYMEKDEIRRHDSFKAFEEICSIAEQKNVDFVLLGGDLFHENKPSRTTLVKTIEILRRYCLNDKPVQFQVVSDQTINFANVFGHVNYEDPHFNVGLPVFSIHGNHDDPAGVDNLSAVDILSACNLVNYFGKMVLGGSGVGQITLYPILVKKGSTSVALYGLGNIRDERLNRMFQTPHAVQWMRPEPQEDCQVSDWFNILVLHQNRVKTNPKNAINEHFLPRFLDFIVWGHEHECLVDPQEVPGMGFHITQPGSSVATSLIDGESKPKHVLLVEIKGNQYRPTKIPLHSVRPFEYKEVVLKDEPDIDPNDQNSILEHLDNEVNSLIEKCSRRDARKSEPMLPLIRLKVDYSGFMTINPQRFGQKYVGKVANPQDILIFSKASKRAQGDAKLKDTERLRPEELNQQNIEALVAESELKMEILPVNDLDEALQNFINKDDRMAFYTCLQYNIEETRKSISRDPENIKSEVDDIIVKVENCLEERVKGRSRSKDDQLFTSSSQSIENMINKAPGGIGSAVSFSDDEDTTQLYGSKSTGRGKKGSLQPFKSARDVSAPTRRGGRGRGRGSNSLKQTTLDATFMSRRSERSASVAASASVQSMAADEENLDSDSDDEPVQYGINELRDSSDDNESMQQGKGRKRGATRGRGRGSTAAKRGRKSDNTSSSIHQMMMSKDDDDDDDDDMPKRTNKTQPRVTRNYGALRR

SEQ ID NO: 123 - DNA, 2660 bp, Hordeum vulgare
gggcgtcaattcttttctttcctttcctttcctcccgctgcctccggttcgtccgccgctgagactggtgctgccgcgccgcccggggtggtcgtcagcagccgccactccgccgccgccggtgcgcgcagcggagggtgcgagcggtcacccagacgctcgagctgccactatcgcctgcggacggcggttcctcccccccgttcggtagccacggttggcttcttccatccgcgacggtggaggcggcctccggagaagcgaagtgagctgttgaccggaaacgagtgctttggctctagttggtacctgcagaggcaatggaagacgacagagacacgctccgggtacttgtggccactgattgccatctgggctacatggagaaggacgagatacgcaggtttgattcgttcgaggcatttgaggagatatgctcgttagcaaagcagaaggaggtagactttgtgcttctcggtggtgacctgttccatgagaacaagccttcacgttcgaccttggtcaagaccattgagattctacgtcgctactgcctaaatgacctgccagtcaagttccaggttgtcagtgatcagacagtcaacttcccaaacagattcggccacgtaaactatgaagacccacatttcaatgttggcttgcctgtgttcactatccatggaaatcatgatgaccctgctggggtggataacctctctgctattgatatcctttcggcttgcaatcttgtaaattattttgggaagatggaccttggcggctctggtgttggtcaaatagccgtccatccagtacttgttaaaaagggtacaactacagttgcactatatggccttggaaacattagagatgagcgactgaacagaatgtttcagacaccacattcagtacaatggatgcgacctgaaagtcaagagggtctgtcagtatctgactggttcaatatcctggtacttcatcagaataggataaagacaaacccgaaaagtgccatcaatgagcatttcttaccacgttttctagatttcgtggtatggggccatgagcatgaatgccttattgacccgcaggaggtccctggaatgggttttcacatcacacagccaggctcatcagttgcaacctccctgattgatggtgaagcaaaaccaaagcatgttcttttgttagaaatcaagggaaaccagtataggccaaccaaaatacctttgatgaccgttagaccttttgagtatgctgaggttgtgttgaaagatgaagcagatgtcgaccctaatgatcaggcctctgttcttgaacatttggataaaattgtaagaaatctgattgaaaagagtagtcaaccagcagccagtagatctgaagccaaacttccattagttcgaatcaaggtagattactctgggttttcaacaataaacccacaacgatttggtcagaagtatgtcggcaaggttgcaaacccccaagatattctcattttctcaaaagcagcaaagaagcgtcagactactacaggagagaatatcgacgagtccgagaaacttcgtcctgaggaactaaaccaacaaactattgaagctttggtcggagaaaataacttgaaaatggagattcttccagttgacgacttggacattgcattgcatgacttcgtcagcaaggatgacaagaccgcattctatgcctgtttgcagcgaaatctggatgaaaccaggaaaaaactgaattctgaagcagagaaatttaaaatcgaggaagaagatataatagttaaagtcggcgagtgcatgcaggaacgtgtaaaggaaatatccctccgctccaagggagacacagggctcgcatcaagcacccaaaatttggatactactagaggtaaatctgtagcagctgaaagtagtctgaacacttttagtgatgacgaggacacccgggagttgcttcttggtaccagatcaaccaggtcaacagctggttttactagaccttctaaagatgctactggtgccgctaaaggtggagcttccaaaagaggcagggggaaaggctcattgaaacaaaccactcttagtttcagtcaatcaaggtcaagtgctgctattcgcagtgaggatgtggactcttcctcggatgaggatgcaggggacggagcaaatgaagttgttgaaaattcagaacctgaggacagtttcccacaaagtggacggaagaggccggctcctagaggtagaggtcgggccagaggcactaccaccgcaaaaagagggaggaaagccgacaccggttccatgccgagcatggtgatgagcaaagatgatgacagcgacgaagatgacaagcctaagaaacctccgcctcgggccacgaggaactacggagccgtcaagaggagatgattctcgttcttgtgaagcgatttggagaatcaagggcggggttagaatagctggtgtgctcccatcaacctggctggcggtctgttcgcagtgaacgacaagtggaaactcgattacacgttctcgtgtaccatgtaatttatatgcttgtagctgctaaaccctggtagtactagtttgccagtttaccattgggaactattatcatcgaaaatacatacactctgttccaggctgtcc

SEQ ID NO: 124 - protein, 699 aa, Hordeum vulgare
MEDDRDTLRVLVATDCHLGYMEKDEIRRFDSFEAFEEICSLAKQKEVDFVLLGGDLFHENKPSRSTLVKTIEILRRYCLNDLPVKFQVVSDQTVNFPNRFGHVNYEDPHFNVGLPVFTIHGNHDDPAGVDNLSAIDILSACNLVNYFGKMDLGGSGVGQIAVHPVLVKKGTTTVALYGLGNIRDERLNRMFQTPHSVQWMRPESQEGLSVSDWFNILVLHQNRIKTNPKSAINEHFLPRFLDFVVWGHEHECLIDPQEVPGMGFHITQPGSSVATSLIDGEAKPKHVLLLEIKGNQYRPTKIPLMTVRPFEYAEVVLKDEADVDPNDQASVLEHLDKIVRNLIEKSSQPAASRSEAKLPLVRIKVDYSGFSTINPQRFGQKYVGKVANPQDILIFSKAAKKRQTTTGENIDESEKLRPEELNQQTIEALVGENNLKMEILPVDDLDIALHDFVSKDDKTAFYACLQRNLDETRKKLNSEAEKFKIEEEDIIVKVGECMQERVKEISLRSKGDTGLASSTQNLDTTRGKSVAAESSLNTFSDDEDTRELLLGTRSTRSTAGFTRPSKDATGAAKGGASKRGRGKGSLKQTTLSFSQSRSSAAIRSEDVDSSSDEDAGDGANEVVENSEPEDSFPQSGRKRPAPRGRGRARGTTTAKRGRKADTGSMPSMVMSKDDDSDEDDKPKKPPPRATRNYGAVKRR

SEQ ID NO: 125 - DNA, 2708 bp, Triticum aestivum
gggcgggtcaattcttttctttcctttcctcccgctgcctccggttcgtccgccgctgacaccggtgtcgtcggcagccgcgactcttccgccgccggtgcgtgcaggggagggttcgaccggtccgtcggctggctgacgctcgagctccgactagcgcctgcggacggctgtttcgcgccaggtcggtctccgcggtgggcttctcccatcgacggcggtggcggtggaggcggcctcaggagaagcgaagtgagccgttgttcggagacgagtgctttggctcaagtttgaaccagcagagcaatggaagatgacagagacacgctccggatacttgtggccaccgattgccatctgggctacatggagaaggacgagatacgaaggtttgattcgttcgaggcttttgaggagatatgctcgttggcaaagcagaaggaggtagactttgtgcttctcggtggtgacctgttccatgagaacaagccttcacgttcaaccttggtgaagaccattgagattctacgtcgctactgcctgaatgacctgccagtgaagttccaggttgtcagtgatcagacagtcaacttcccaaacagatttggccatgtaaactatgaagacccacatttcaatgttggcttgcctgtgttcactatccatggaaatcatgatgatcctgctggggtggataacctctctgctattgatatcctttcggcttgcaatcttgtaaattattttgggaagatggaccttggcggctctggtgttggtcaaatagctgtccatccagtacttgttaaaaagggtacaactacagttgcactatatggccttgggaacattagagatgagcgactgaacagaatgtttcagacaccacattcagtacaatggatgcgacctgaaagtcaagagggtctgtccgtatccgactggttcaatatcctggtacttcatcagaacaggataaagacaaacccgaaaagtgccatcaatgagcatttcttaccacgttttctagacttcgtggtatggggccatgagcatgaatgccttattgacccccaggaggtccctggaatgggttttcacatcacgcagccaggctcatcagttgcaacctccctgattgacggtgaagcaaaaccaaagcatgttcttttgttggaaatcaagggaaaccagtataggccaaacaaaatacctttgatgaccgttagaccttttgagtatgctgaggttgtgctgaaagatgaagcagatgtcgaccctaatgatcaggcctctgttcttgaacatttggataaaattgtaagaaatctgatcgaaaagagtagtcaaccaacagctagtagatctgaagccaaacttccattagttcgaatcaaggtagattactctgggttttcaacaataaacccgcaacgatttggtcagaagtatgtcggcaaggttgcgaacccccaagatattctcattttctcaaaagcagcaaagaagcgccagactactacaggagagaatatcgatgagtccgagaaacttcgtcctgaggaactaaaccaacaaactattgaagctttggttgcagaaaataacttgaaaatggagattcttccagttgacgacttggacattgcattgcatgactttgtcagcaaggatgacaagaccgcattctatgcctgtttgcagcgaaatctggatgaaacaaggaagaaactgaattctgaagcagagaaatttaaaatcgaggaagaagatataatagtcaaagtcggcgagtgcatgcaggaacgtgtaaaggaaatatccctccactccaagggagacacagggcttgcatcaagcactcaaaatttggattctactagaggtaaatctgtagcagctgaaagtagcctgaacacttttagtgatgacgaggacaccagggagttgcttcttggtacgagatcaacccgatctacagctggatttactagaccctctaaagatgctactggtgccgctagaggtggagcttccaaaagaggcagggggaaaggctcattgaaacaaaccacccttagtttcagtcaatcaaggtcaagtgctgctattcgcagtgaggaggtggactcttcctcggatgaggacgcagcaaacgaagcaaatgaagttgttgaaaattcagatcctgaggacagtttcccacaaagtggacggaaaaggccggctcctagaggtagaggtcgggccagaggcactaccactgcgaaaagagggaggaaagccgacactggttccatgccaagcatggtgatgagcaaagacgatgacagcgacgaagatgacaagcctaagaaacctccgcctcgggtcacgaggaactacggggccgtcaagaggagatgattctcgttctcatgaagcgattcggagaatcaagggcacggttagaatagctgatgtgttcccatggacctggctggcggtctgtttgcggtgaaagacaagtggaactcgattacacgatctcgtgtactgtaatttatatgcttgtaactgctaaacgctggtagttagtttgccagtttaccattgggaactattatcattgacatatagtgttccaggctagtcggtcgtgtgatgcctatggcatccacagaagtctgttaagcaaggcattgaactgaaaaaaaaaaaaaaaacga

SEQ ID NO: 126 - protein, 730 aa, Triticum aestivum
MEDDRDTLRILVATDCHLGYMEKDEIRRFDSFEAFEEICSLAKQKEVDFVLLGGDLFHENKPSRSTLVKTIEILRRYCLNDLPVKFQVVSDQTVNFPNRFGHVNYEDPHFNVGLPVFTIHGNHDDPAGVDNLSAIDILSACNLVNYFGKMDLGGSGVGQIAVHPVLVKKGTTTVALYGLGNIRDERLNRMFQTPHSVQWMRPESQEGLSVSDWFNILVLHQNRIKTNPKSAINEHFLPRFLDFVVWGHEHECLIDPQEVPGMGFHITQPGSSVATSLIDGEAKPKHVLLLEIKGNQYRPNKIPLMTVRPFEYAEVVLKDEADVDPNDQASVLEHLDKIVRNLIEKSSQPPASRSEAKLPLVRIKVDYSGFSTINPQRFGQKYVGKVANPQDILIFSKAAKKRQTTTGENIDESEKLRPEELNQQTIEALVAENNLKMEILPVDDLDIALHDFVSKDDKTAFYACLQRNLDETRKKLNSEAEKFKIEEEDIIVKVGECMQERVKEISLRSKGDTGLASSTQNLDTIRGKSVAAESSMNTFSDDEDTRELLLGTRSTRSTAGFTRPSKDATGAARGGASKRGRGKGSLKQTTLSFSQSRSSAAIRSEEVDSSSDEDAANEANEVVENSDPEDSFPQSGRKRPAPRGRGRARGTTTAKRGRKADTGSMPSMVMSKDDDSDEDDKPKKPPPRSRGTTGPSRGDDSHSHEAIWRIKGRVRIADVFPSTWLAVCLQ

SEQ ID NO: 127 - DNA, 2043 bp, Secale cereale
atggagaaggatgagatacgaaggtttgattcgttcgaggcttttgaggagatatgctcgttagcaaagcagaaggaggtagactttgtgcttctcggtggtgacctgttccatgagaacaagccttctcgttcgactttggtgaagaccattgagattctacgtcgctactgcctaaatgacctgccagtgaagttccaggttgtcagtgatcagacagtcaacttcccaaacagatttggccacgtaaactatgaagacccacatttcaatgttggcttgcctgtgttcactatccatggaaatcatgatgatcctgccggggtggataacctctctgctattgatatcctttcggcttgcaatcttgtaaattattttgggaagatggaccttggcggctctggtgttggtcaaatagctgtccatccagtacttgttaaaaagggtacaactacagttgcactatatggccttgggaacattagagatgagcgactgaacagaatgtttcagacaccacattcagtacaatggatgcgacctgaaagtcaagagggtctgtcagtatccgactggttcaatatcctggtacttcatcagaacaggataaagacaaacccgaaaagtgccatcaatgagcatttcttaccacgttttctagacttcgtggtatggggccatgagcatgaatgccttattgacccccaggaggtccctggaatgggttttcacatcacgcagccaggctcatcagttgcaacctccctgattgatggtgaagcaaaaccaaagcatgttcttttgttagaaatcaagggaaaccagtataggccaaacaaaatacctttgatgaccgttagaccttttgagtatgctgaggttgtgttgaaagatgaagcagatgtcgaccctaatgatcaggcctctgttcttgaacatttggataaaattgtaagaaatctgatcgaaaagagtagtcaaccaacagccagtagatctgaagccaaacttccattagttcgaatcaaggtagattactctgggttttcaacaataaacccacaacgatttggtcagaagtatgtaggcaaggttgcgaacccccaagatattctcattttctcaaaagcagcaaagaagcgccagacttctacaggagagaatatcgatgagtccgagaaacttcgtcccgaggaactaaaccaacaaactattgaagctttggttgcagaaaataacttgaaaatggagattcttccagttgacgacttggacattgcattgcatgactttgtcagcaaggatgacaagaccgcattctatgcctgtttgcagcgaaatctggatgaaacaaggaagaaactgaattctgaagcagagaaatttaaaatcgaggaagaagatataatagtcaaagtcggcgagtgcatgcaggaacgtgtaaaggaaatatccctccgctccaagggagacacagggctcgcatcaagcactcaaaatttgcaggatactactagaggtaaatctgtagcagctgaaagtagcctgaacacttttagtgatgacgaggacaccagggagttgcttcttggtaccagatcaaccagatctacagctggatttactagaccctctaaagatgctactggtgccgctagaggtggagcttccaaaagaggcagggggaaaggctcattgaaacaaaccacccttagtttcagtcaatcaaggtcaagtgctgctattcgcagtgaggaggtggactcttcctcggatgaggacgcagcgaacgaagcaaatgaagttgttgaaaattcagatcctgaggacagcttcccgcaaagtggacggaaaaggccggctcctagaggtagaggccgggccagaggcactaccactgcgaaaagagggaggaaagccgacactggttccatgccaagcatggtgatgagcaaagacgatgacagcgacgaagatgacaagcctaagaaacctccgcctcgggtcacgaggaactacggagccgtcaagaggagatga

SEQ ID NO: 128 - protein, 680 aa, Secale cereale
MEKDEIRRFDSFEAFEEICSLAKQKEVDFVLLGGDLFHENKPSRSTLVKTIEILRRYCLNDLPVKFQVVSDQTVNFPNRFGHVNYEDPHFNVGLPVFTIHGNHDDPAGVDNLSAIDILSACNLVNYFGKMDLGGSGVGQIAVHPVLVKKGTTTVALYGLGNIRDERLNRMFQTPHSVQWMRPESQEGLSVSDWFNILVLHQNRIKTNPKSAINEHFLPRFLDFVVWGHEHECLIDPQEVPGMGFHITQPGSSVATSLIDGEAKPKHVLLLEIKGNQYRPNKIPLMTVRPFEYAEVVLKDEADVDPNDQASVLEHLDKIVRNLIEKSSQPTASRSEAKLPLVRIKVDYSGFSTINPQRFGQKYVGKVANPQDILIFSKAAKKRQTSTGENIDESEKLRPEELNQQTIEALVAENNLKMEILPVDDLDIALHDFVSKDDKTAFYACLQRNLDETRKKLNSEAEKFKIEEEDIIVKVGECMQERVKEISLRSKGDTGLASSTQNLQDTTRGKSVAAESSLNTFSDDEDTRELLLGTRSTRSTAGFTRPSKDATGAARGGASKRGRGKGSLKQTTLSFSQSRSSAAIRSEEVDSSSDEDAANEANEVVENSDPEDSFPQSGRKRPAPRGRGRARGTTTAKRGRKADTGSMPSMVMSKDDDSDEDDKPKKPPPRVTRNYGAVKRR

SEQ ID NO: 129 - DNA, 2643 bp, Oryza sativa
gcacaacctagcccactccgccgccgccgctcgtccacagctcgccgccgcggcgcccctcccggcgacgactgatgctccgccccctagccgcctccaccccgccgtccccgagcagctcgccgacgctgaccagagcagaggcccgtacgacggtctccgaactgctcgcgaagtaggggaagccgccaccgcgttgtcgtcgcctaagcttcgccggtgctcgcagggttttggtttggtttggtttggtccgtgagggtttgatcaggaaagtgcttgggctcaagtctgaagctgaaccaacaccggcaatgggagacgaaagcaacacactccgtgtacttgtggcaaccgattgccatctcggctacatggaaaaggacgagattcgtaggtttgattcatttgaggcgtttgaagagatatgctcattagcagagcagaataaggttgattttgtgctacttggtggtgaccttttccatgagaacaaaccttcacgttcaaccttagttaagaccattgagattctacggcgttactgcttgaatgaccagccagtgaagttccaggttgtcagtgatcagacaatcaactttccaaacagattcggccaagtaaattatgaagatccaaacttcaatgttggattgcctgtgttcactatccatggaaaccatgatgatccagctggtgtggataatctctctgcaattgatattctctcagcctgcaatcttgtaaattattttgggaagatggaccttggtggctctggtgttggtgaaatagcagtctatcctgtactcgtaaaaaagggtacaacttttgttgcgctctatggccttggaaacattagagatgaacgattaaacaggatgtttcagacacctcatgctgtacaatggatgcgacctgaaactcaagatggaatgtcagtatctgactggttcaatattcttgttcttcatcagaataggataaaaacaaaccctaaaagcgcaatcaatgagcatttcttaccacgttttctggactttatagtatggggccatgagcatgaatgccttattgatccccaggaggtacctgggatgggttttcacatcactcaaccaggctcatcagttgcaacctccctgattgatggtgaagcaaaaccaaagcatgttctcttgttagaaatcaagggaaaccagtataggccaaccaaaatacctttgagatccgttaggccctttcactatgctgaggttgtgttaaaagatgaagtggatgttgatcccaatgatcaggcctctgttcttgaacatttggataaaattgtaagaaatcttattaagaagagtagtcagccaacagccagtagaccagagaccaaacttccactaattagaatcaaggtagattactctgggttttcaacaattaatccacaacgatttggtcagaagtatgtcgggaaggttgcaaacccccaggatattcttatcttctcaaaatcagcaaaaaagcgtcagactactggagtaggcaatattgatgactctgagaaacttcgtcccgaggaactaaaccaacaaactattgaagctttggttgccgaaaataacttgaaaatggagattcttccagttgatgacttggacattgcattgcatgattttgtgagcaaggatgacaagatggcgttttatgcctgtttgcagcggaatcttgaagaaaccagaactaaattgaattcagaggcagataaatttaaaatagaggaagaagatataatagtcaaagttggcgagtgcatgcaggaacgtgtgaaggaaaggtccctccgctccaaggaagattcacggttcacgtcaagctctcaaaacttggatactggaggtagatctgttacagctcaaagtaacctgaactctttcagtgatgatgaagacaccagggagatgcttctcggtgcaagaacaactaatgctggaaggaaagcatctggatttacaagaccctctaaagatgctaccgatgttgccaaaactggaacttccagaaggggcaggggaagagggacggcctcaatgaagcagaccactctgaatttcagccaatcaaggtcaagtgctgctatccgcagtgaggaagtgcaatcttcttcagatgaggaaaatgagactaatgaagcaaacgaagttgttgaatcttcagaaccggaggagagtccccaacaaactggacggaaaagggcagctcctagaggtggtagaggtaggggtagaggcgctactgcaaaaaggggtagaaaagcagatatttcatccatccagagcatgctgatgagcaaagatgatgatgacgatgatgaagatgacaggccgaagaaacctccacctcgggtcactaggaactacggagctgttaggaggagatgacctcttgttagtctaagtctgcctggcaaattaagtttccaatgaactactggaacgccaactcgcgtgatttgtacattccttagcctcatggatttacgtgcttgtagctgctaaatgctggatgtcagtttgtacattggcaacatgacattcatgcgggcacaagggattctcatcatcaatagtaggtgttcttcagagactagaa

SEQ ID NO: 130 - protein, 705 aa, Oryza sativa
MGDESNTLRVLVATDCHLGYMEKDEIRRFDSFEAFEEICSLAEQNKVDFVLLGGDLFHENKPSRSTLVKTIEILRRYCLNDQPVKFQVVSDQTINFPNRFGQVNYEDPNFNVGLPVFTIHGNHDDPAGVDNLSAIDILSACNLVNYFGKMDLGGSGVGEIAVYPVLVKKGTTFVALYGLGNIRDERLNRMFQTPHAVQWMRPETQDGMSVSDWFNILVLHQNRIKTNPKSAINEHFLPRFLDFIVWGHEHECLIDPQEVPGMGFHITQPGSSVATSLIDGEAKPKHVLLLEIKGNQYRPTKIPLRSVRPFHYAEVVLKDEVDVDPNDQASVLEHLDKIVRNLIKKSSQPTASRPETKLPLIRIKVDYSGFSTINPQRFGQKYVGKVANPQDILIFSKSAKKRQTTGVGNIDDSEKLRPEELNQQTIEALVAENNLKMEILPVDDLDIALHDFVSKDDKMAFYACLQRNLEETRTKLNSEADKFKIEEEDIIVKVGECMQERVKERSLRSKEDSRFTSSSQNLDTGGRSVTAQSNLNSFSDDEDTREMLLGARTTNAGRKASGFTRPSKDATDVAKTGTSRRGRGRGTASMKQTTLNFSQSRSSAAIRSEEVQSSSDEENETNEANEVVESSEPEESPQQTGRKRAAPRGGRGRGRGATAKRGRKADISSIQSMLMSKDDDDDDEDDRPKKPPPRVTRNYGAVRRR

SEQ ID NO: 131 - DNA, 2934 bp, Glycine max
aggaaaacaaaaaggtcccgcccattctgacaaaactccggagctaatacgacgccgttctgttcccttcacccaaatttctgcacaacactgactgatacagtatcacacaacaacactgcaattcctttttccctcgagcaacgacgatggaggacgcggaagcggcgaacacgcttcgcattctggtggcgacggactgccacctcggttacatggagaaggatgaggtgcgccgccacgactccttccacgccttcgaggagatttgcgccgtcgccgagcgccaccgcgtcgacttcgtcctcctcggcggcgacctcttccacgagaacaagccctctcgctccacgctcgtcaaggccatcgagattctccgccgctactgcctcaacgaccgccccgtccccttccaggtcgtcagcgaccagacgctcaatttccagaacgcgtttggtcatgtgaactatgaggatcctcacttcaatgttggattgccggtatttactattcacggaaaccatgacgatcctgctggcgtggacaacctttctgtagtcgatattctctcggcatgtaatctagtcaactactttgggaaaacagttcttgggggttctggtgtcggtcagatcactatccaccctattcttatcaagaagggttcaacatctgtagctctgtatggtctgggaaacattagagatgaaaggcttaataggatgtttcaaacaccgcatgctgttcaatggatgcgacctgaatctcaggaagggtgtcaagtgtctgattggttcaacattcttgtacttcatcagaacagggttaaaacaaatccaaaaaatgcaataaatgagcacttcttgccacgcttcctagacttcattgtgtggggccatgaacatgaatgtttggttgacccgcaggaagttccaggaatgggatttcacatttcacaaccagggtcatcagttgctacatcacttattgatggagaatcaaagccgaagcatgtacttcttctggaaattaagggaaatcaatatcgcccaactaagatacctttgatgtctgtgcggccttttgagtatactgaggttatactaaaagatgagccggacattgatcccaatgatcaaagttctattcttgaacacctagacaaagtggttggaaaacttatagaaaagtctagtaagcaggtcatcaatagaaaagaactcaagcttccactaatacgtatcaaggtagattactctggatttatgactataaatcctcaaagatttgggcagaaatatgttgggaaggttgcaaatccccaagacattctcattttctcaaaggctacaaaaagggccaaggttgaaggaaaaattgatgattcagaacgacttcgtccagaagaattaaaccaacagaacatagaggctttggttgctgaaagtaatctgaaaatggagatactgccagttaatgatttggatattgcattgcaaaattttgtgaacaaagatgataaaatggcattttactcttgtgtaaaatacaatatcgaggaaacacgaaataaacttgctaaggattcagacaacgtgaagtttgaagaggaagatttaattgttaaagttggagaatgcttggaggaacgtgtcaaggaacgatctgtacactccaaggaacccacacagctcactgctgatgctcaaccatggaaggatttccaaggcagaagtgctgctggaactggaagtgcagtttcctttagtgatgatgaagatgccatgccagtatctagttcaaagccaagtactagaggtcgaaaagggtcatctggtgcgtctcaaactacaaccagaggaaggggcaggggaagaggaagaggtagaggttccagcaccatgaagcagacaactattgatggagctttagggtttcgcgtttctcagaggtctgcatcagttgctgcagcaactgccatccgaagtggtgctgacgatgataacttggcttctgcttcaagtgatgatgccaataaaaatgatgttgaagagatcgatgatagttcggaaaatgaatccaatctaccaggacagaagagggctgcttcaaagggaagaggtagaggatctacacagtcttctaaacgcggaaggaaatcagataactcttcaatccatagaatgctcgtgaacaatgatgatgacgatgacgatgacgacaccgacatcagaaagagattaaataagtctcaacctcgggttactaaaagctatggagctctaagaaggtgaacaatctgttagatgtgatgttttctaccagccccggtatcaagataaatgctgtcataggctgaattaatagctgtattacattatatagtaaaatattgagtgagtgtgagttcgactagcttagtaacgtcttgcctgagattcggagatacaccggttcagcagaatagagttaagtaatgttatatgtgggcactgacgaaagcaaacccagctcgagaatgggttctgcagcattgcagccaggttgtgttatgctgaatgctttctttgtctggccaactacttaagaagttgttcttgagtttcaatgactacttacaagaattgtgttcaacacaagaagttttagggttgtcggctctagaccagaacccatttagtagtgggccacttcctgatttttctaggctttcatacttaaagacattgagacttcaaaataccaacattgttgggccattatcatttgaccacttgccccatcttgatgttttggatctaagtttaaaccatttgagtggaccaattcctatgttcaaggtcactaaatttgcctcattatactatttggacctttccaacaatgaattgagtgggaagctttcatatactattggtcaactttttaatctca

SEQ ID NO: 132 - protein, 714 aa, Glycine max
MEDAEAANTLRILVATDCHLGYMEKDEVRRHDSFHAFEEICAVAERHRVDFVLLGGDLFHENKPSRSTLVKAIEILRRYCLNDRPVPFQVVSDQTLNFQNAFGHVNYEDPHFNVGLPVFTIHGNHDDPAGVDNLSVVDILSACNLVNYFGKTVLGGSGVGQITIHPILIKKGSTSVALYGLGNIRDERLNRMFQTPHAVQWMRPESQEGCQVSDWFNILVLHQNRVKTNPKNAINEHFLPRFLDFIVWGHEHECLVDPQEVPGMGFHISQPGSSVATSLIDGESKPKHVLLLEIKGNQYRPTKIPLMSVRPFEYTEVILKDEPDIDPNDQSSILEHLDKVVGKLIEKSSKQVINRKELKLPLIRIKVDYSGFMTINPQRFGQKYVGKVANPQDILIFSKATKRAKVEGKIDDSERLRPEELNQQNIEALVAESNLKMEILPVNDLDIALQNFVNKDDKMAFYSCVKYNIEETRNKLAKDSDNVKFEEEDLIVKVGECLEERVKERSVHSKEPTQLTADAQPWKDFQGRSAAGTGSAVSFSDDEDAMPVSSSKPSTRGRKGSSGASQTTTRGRGRGRGRGRGSSTMKQTTIDGALGFRVSQRSASVAAATAIRSGADDDNLASASSDDANKNDVEEIDDSSENESNLPGQKRAASKGRGRGSTQSSKRGRKSDNSSIHRMLVNNDDDDDDDDTDIRKRLNKSQPRVTKSYGALRR

SEQ ID NO: 133 - DNA, 2644 bp, Solanum tuberosum
aattccccgccaggctcctcccccattccaaccggtcagtctatcaagagttgcagccatagctaaaatagctccgaacttgtcttcctgcaatttttcgagaaagatcatctctttctcaaatctcagctcctcaattccttgttcgaagacatcaaagttgagagttcatcttcaatcaaatggacgatacttcaagggatgaggggagcaacaccattaggatcctggttgctacggactgtcacttgggctatatggagaaggatgaagtacgtaggcatgattcatttcaggcatttgaagagatatgttcaatcgcggagaaaaaacaggtggactttgtgcttctcggtggtgatctgtttcatgagaataagccatccagagcaacactggtaaaagccattgagattcttcgccgctattgtctcaatgatcaaccggtgcaattccaagttgttagtgaccagacagtgaactttgctaacctatttggtcatgtaaattatgaagatcctcactttaatgtggggttgcctgttttcagcattcatggcaatcacgatgatccagctggtgtggacaacctatctgcagttgacatcctttcggcatgcaatcttgtcaactattttggtaaaatggatctcggtggttctggtgttggacagatcgctctgcaccctattcttatcaggaagggtttaacatcagttgctctttatggtcttgggaatatcagagatgaacggttgaatagaatgtttcaaacaccacatgctgtgcaatggatgcgacctgaggctcgggaagggtgtcaagtatcagactggttcaacattttggtacttcaccaaaatagagtaaagacaaatccaaaaaatgcaataaatgagcatttcctgcctcggtttctggattttattgtgtggggtcacgaacatgaatgtttagtggatcctcaggaggttccaggtatgggttttcacattactcagccaggttcatctgttgcgacatcactgattgagggcgaatcaaaacaaaaacatgtacttttattagaaattaagggaaatcaatatcgtccaacaaagatacctctgaactcagtgcgtccttttgaatatactgaggttgtgctgaaggatgaacctgatattgatcctaatgatcacagttcgattcttgaacatttggataaagtagtcaaaaagttgatagaaagatctagtcaaaaggctaataatggatctgttgtaaagctccctttagttcgagtaaaggtagactactctgggtttatgactataaatcctcaaaggttcggacaaaaatatgtggggaaggttgccaatccacaggatattctcatattctcaaaatcttcaaaaaagtttggcaaggaagctaaatttgatgattctgagcggcttcgccctgaagaattgaatcagcaaaacattgaagctttagttgctgagagcaatttgaaaatggaggtacttccagtgagtgatctggacgttgccctgcacaattttgttaacaaggatgagaaaatggctttttattcttgtgtacaatacaaccttgaggaaactcgaagcaaaatagctcgtgattcagatccggtgaaattcgaagaatatgatataattttaaaagttggagagtgcttagaggaacgcgtcaaacaaagaactgaaagaaataaagatgatcaacctttctcctttagtggacagtctttggaggatattagaggcaaaagtactggagtaggatctgcagtttcattcagtgatgatgaggatgcctctatgctctccgcctcaaagtctactgctggaaaaggaaagaaagagtcatctcaatcttttagatcctctcgtgaagtttctgaagttggcaagacctcttcaaggggtaggggtagaggcagaggaagggcttccaatagcttgaagcagacaacccttgatgcatctctgggattccgtcagtcacagagatctgcatcaattgccgcatctgcgtcagtgcgaagtattgccgcagatgatgagaatgtggaatctccttcaagtgatgaagatgccaaacaggacactaacgttattgacgaaagctcagatgatgataagacagttcaggccaaaggacgcaaaagggctgctccaaggggaaggggtagaggttcagcaacagcggctaaaaggggaagaaaaccagatagctcctcatcttcacttcaaaggatgctcatggatgttaatatagatgacgatgatgatgatgatgacatgacaaagaaagagaaaagacctcaacctcgggcaactaggaattatggtgctttaaggtggtgaccgtagctggaacttctgataccatttgttccattcagggatgttgattatgatgaccaaatttgcgtagtgagttgtaaatacactagtaagttacagagtgttttcggtttcaattgcagtggttttttgtatttgtcattgttgatatgcgagagtaggtctcgtttctttgaagtatatacattgatataccgatggcttcaaaatctaatccaatcatttttggacatccatttgctttaatgaacaacgacatggttatgttt

SEQ ID NO: 134 - protein, 730 aa, Solanum tuberosum
MDDTSRDEGSNTIRILVATDCHLGYMEKDEVRRHDSFQAFEEICSIAEKKQVDFVLLGGDLFHENKPSRATLVKAIEILRRYCLNDQPVQFQVVSDQTVNFANLFGHVNYEDPHFNVGLPVFSIHGNHDDPAGVDNLSAVDILSACNLVNYFGKMDLGGSGVGQIALHPILIRKGLTSVALYGLGNIRDERLNRMFQTPHAVQWMRPEAREGCQVSDWFNILVLHQNRVKTNPKNAINEHFLPRFLDFIVWGHEHECLVDPQEVPGMGFHITQPGSSVATSLIEGESKQKHVLLLEIKGNQYRPTKIPLNSVRPFEYTEVVLKDEPDIDPNDHSSILEHLDKVVKKLIERSSQKANNGSVVKLPLVRVKVDYSGFMTINPQRFGQKYVGKVANPQDILIFSKSSKKFGKEAKFDDSERLRPEELNQQNIEALVAESNLKMEVLPVSDLDVALHNFVNKDEKMAFYSCVQYNLEETRSKIARDSDPVKFEEYDIILKVGECLEERVKQRTERNKDDQPFSFSGQSLEDIRGKSTGVGSAVSFSDDEDASMLSASKSTAGKGKKESSQSFRSSREVSEVGKTSSRGRGRGRGRASNSLKQTTLDASLGFRQSQRSASIAASASVRSIAADDENVESPSSDEDAKQDTNVIDESSDDDKTVQAKGRKRAAPRGRGRGSATAAKRGRKPDSSSSSLQRMLMDVNIDDDDDDDDMTKKEKRPQPRATRNYGALRW

SEQ ID NO: 135 - DNA, 2655 bp, Solanum lycopersicum
aaatattcttttaaattccccgccaggctccttccccattccaaccggtgagtcagtctcacaagagttgcagccatagcttaaacagctcagaacttgtcttctgcatctctttctcaaatctcaactcctcaatttcttttttttgaagatatcaaagttaagagttcatcttcaatcaaatggacgatacttcaagggatgaggggagcaacaccattaggatcctagtcgctacggactgtcacttgggctatatggagaaggatgaagtacgtaggcatgattcttttcaggcatttgaagagatatgttcaatcgcggagaaaaaacaggtggactttgtgcttctcggtggtgatctgtttcatgagaataagccatccagggcaacactggtgaaagccattgagattcttcgccgctattgtctcaatgatcaaccggtgcaattccaagttgttagtgaccagacagtgaactttgctaacctatttggtcatgtaaattatgaagatcctcactttaatgtggggttgcctgttttcagcattcatggcaatcacgatgatccagctggtgtggacaacctatctgcagttgacatcctttcggcatgcaatcttgtcaactattttggtaaaatggatctcggtggttctggtgttggacagatcgctctgcaccctattcttatcaggaagggtttaacatcagttgctctttatggtcttgggaatatcagagatgaacggttgaacagaatgtttcaaacaccacatgctgtacaatggatgcgacctgaggctcaggaagggtgtcaagtgtcagactggttcaacattttggtacttcaccaaaatagagtaaaggcaaatccaaaaaatgcaataaatgagcatttcctgcctcggtttctggattttattgtgtggggtcacgaacatgaatgcttagtggatcctcaggaggttccaggtatggggtttcacattactcagccaggttcatctgttgcgacatcactgattgagggtgaatcaaaacaaaaacatgtacttctattagaaattaagggaaatcaatatcgtccaacaaagatacctctgaactcagtgcgtccttttgaatatactgaggttgtgctgaaggatgaacctgatattgatcctaatgatcacagttcgattcttgaacatttggataaagtagtcaaaaagttgatagaaagatctagtcaaaaggctaataatggatctgtaaagctccctttagttcgagtaaaggtagactactctgggtttatgactataaatcctcaaaggtttggacaaaaatatgtggggaaggttgccaatccacaggatattctcatattctcaaaatcttcaaaaaagtttggcaaggaagctaaatttgatgattctgagcggcttcgccctgaagaattgaatcagcaaaacattgaagctttagttgctgagagcaatttgaaaatggaggtacttccagtcagcgatctggacgttgccctgcacaattttgttaacaaggatgagaaattggctttttattcttgtgtacaatacaaccttgaggaaactcgaagcaaaatagctcgtgattcagatccggtgaaattcgaagaagatgatataattttaaaagttggagagtgcttagaggaacgtgtcaaacaaagaactgaaagaaataaagatgatcaacctttctcctttagtggacagtctttggaggatattagaggcaaaagtactggagtaggatctgcagtttcattcagtgatgatgaggatggctctatgccctccgcctcaaagtctactgctggaaaaggaaggaaagagtcatctcaatcttttagatcctctcgtgaagcttctgaagttggcaagacctctacaaggggaaggggtaggggtagaggcagaggaagggcttccaatagcttgaagcagacaacccttgatgcatctctgggattccgtcagtcacagagatctgcatcagttgccgcatctgcgtcagtgcgaagtattgccgcagatgatgagaatgtggaatctccttcaagtgatgaagatgccaaacaggacactaccgttattgacgaaagctcagatgatgataagacggttcaggccaaaggacgcaaaagggctgctccaaggggaaggagtagaggttcagcaacagcggctaaaaggggaagaaaaccagatagctcctcatcttcacttcaaaggatgctcatggatgttaatgaagatgacgatgacgatgatgatgacatgacaaagaaagagaataaacctcgacctcgggcaactaggaattatggtgctttaaggaggtgactgtaccatttgtttcattcagggatgttgattatgatgaccaaatttgcctagtgagttgtaaatacactagtaagttacagagtgttttcggtttcaactccagtgttttatttcgtatttgtcaatgttgatacgcggagagtaggtctttttttttttagtatgcattgattataccgatggcttcaattttggccattccatttgctttaatgaacaatgacatggttatgtttcttgtgtgtggtatatagaagtggaaatgttgctacga

SEQ ID NO: 136 - protein, 731 aa, Solanum lycopersicum
MDDTSRDEGSNTIRILVATDCHLGYMEKDEVRRHDSFQAFEEICSIAEKKQVDFVLLGGDLFHENKPSRATLVKAIEILRRYCLNDQPVQFQVVSDQTVNFANLFGHVNYEDPHFNVGLPVFSIHGNHDDPAGVDNLSAVDILSACNLVNYFGKMDLGGSGVGQIALHPILIRKGLTSVALYGLGNIRDERLNRMFQTPHAVQWMRPEAQEGCQVSDWFNILVLHQNRVKANPKNAINEHFLPRFLDFIVWGHEHECLVDPQEVPGMGFHITQPGSSVATSLIEGESKQKHVLLLEIKGNQYRPTKIPLNSVRPFEYTEVVLKDEPDIDPNDHSSILEHLDKVVKKLIERSSQKANNGSVKLPLVRVKVDYSGFMTINPQRFGQKYVGKVANPQDILIFSKSSKKFGKEAKFDDSERLRPEELNQQNIEALVAESNLKMEVLPVSDLDVALHNFVNKDEKLAFYSCVQYNLEETRSKIARDSDPVKFEEDDIILKVGECLEERVKQRTERNKDDQPFSFSGQSLEDIRGKSTGVGSAVSFSDDEDGSMPSASKSTAGKGRKESSQSFRSSREASEVGKTSTRGRGRGRGRGRASNSLKQTTLDASLGFRQSQRSASVAASASVRSIAADDENVESPSSDEDAKQDTTVIDESSDDDKTVQAKGRKRAAPRGRSRGSATAAKRGRKPDSSSSSLQRMLMDVNEDDDDDDDDMTKKENKPRPRATRNYGALRR

SEQ ID NO: 137 - DNA, 2549 bp, Sorghum bicolor
gcccgctccaagcccagtcaaatttccgcaggaccttgacccagttcacccctgcgtcgtcttctcccgttcacccgtgtcctctctcgtggcgacgactgggggacccccggcctcttccgccctaaaccctaaacccttcccttgctgcacctgccagttttagattttacagcaacggattgatttggccaacacgttgagtttggggtccaatgtctgaatcagcacaacctaggggaggggaagttgatagcaatacactgcgaatacttgtagcaactgactgccatctaggctacatggagagagatgagatacgcaggtttgattcctttcaagcatttgaggagatttgtgcattggcggatcaaaacaaggtagatcttattcttcttggcggtgatctattccatgagaacaagccgtcgcgctcaaccctggtaaaaacaattgagattctacggcgctactgcctaaatgatcaaccaataaagttccaggttgtcagtgatcagacagtcaacttcccaaacagatttggtaaggtaaattatgaggaccctaacttcaacgttggtctgcctgtgttcaccatccatggaaatcacgatgaccctgctggagtggataatctctctgccattgatattctttcggcttgcaatcttgtaaattattttggaaagatggaccttggtggctctggtgttggtcagatagcagtttatcctgtactcgtaaaaaagggcatgacttcggttgcactatatggtcttggcaacattagagatgaacgactaaatagaatgtttcagacgcctcattcagtacagtggatgcgacctggaactcaagatggggaatcagtgtctgactggttcaatatattggtacttcatcagaacaggataaagacaaaccctaaaagtgccatcaatgagcattttttaccacgttttctggattttgttgtttggggccatgagcatgaatgcctcattgatcctcaggaggtccctggaatgggcttccacatcactcaaccaggctcctcagttgcgacatccctgattgatggtgaagcaaaaccaaagcatgttcttttgttagaaatcaagggaaatcagtacaggccaaccaaaatacctctgagatctgtcagaccttttgagtatgctgaggttgtgttgaaagatgaagcagatgtggacccaaatgatcaggcctctgtgcttgaacatttggataaaattgtaagaaatctgattgagaagagtagccaaccaactgccagcagatcggagcccaaacttccgttagttagaatcaaggtagattactctgggttttcaacaataaacccacaacgttttggtcagaagtatgtaggaaaggtcgcaaaccctcaagatattctcattttctcaaaatcagcaaagaaacgccagactacaggagatcacattgatgattctgagaaacttcgtcctgaggaactaaaccaacaaacaatcgaagctctggttgcagagagtaacttgaaaatggagattcttccggttgatgatttggacattgcattgcatgattttgtgaacaaggatgacaagatggcattttattcatgtttgcagcgaaaccttgaagaaaccaggaataagttgagttctgaagcagataaatccaaaattgaggaagaagacataatagtcaaagttaacgagtgcatgcaggaacgtgttaaggaaaggtccctacgctccaaggatggcacacgcttcacatcaagctctcagaacttggacattggaggtaaatcttttgcagctcaaagcagcctgaactcattcagtgatgacgaagacaccagggatgcacttcttggtgcaaaatcaactgatgttggacgaaaatcatctggatttactagaccctccaaagataatgctgatgttgctaaacgtggtgcttccaaaagaggcaggggaagaggcaccagctcaatgaagcagaccactcttactttcagccagtcgaggtcaactacggttatccgtagtgaggatgtctcctcagaggaagaagcagatgcaaatgaagttgttgaaaattcagaagaagagagtgcgcaacaagttgggcgtaaaagagcagctcctagaggtagaggaagaggtagaggttccactgcaaagagggggcggaaaacagatattgcttctatccaaagtatgatgagcaaagatgatgatgattcagaagatgagccgccaaagaaagctcctcctcgggtcacaaggaactatggcgctgtcaggaggagatgacccttaagaaagttcttgctcatgagggtttagggtaggtatgtgtcttagaagagccggtgttttcatcaaccaggacgtttgacacagtttgttttgccgtgaactgactgtatcttgtccacgcccgagtgtaacgaatttatacatcttgtagctgctaaattccagcggttgcattgtacatattatgcatgtcaaatgaattctgataaatca

SEQ ID NO: 138 - protein, 704 aa, Sorghum bicolor
MSESAQPRGGEVDSNTLRILVATDCHLGYMERDEIRRFDSFQAFEEICALADQNKVDLILLGGDLFHENKPSRSTLVKTIEILRRYCLNDQPIKFQVVSDQTVNFPNRFGKVNYEDPNFNVGLPVFTIHGNHDDPAGVDNLSAIDILSACNLVNYFGKMDLGGSGVGQIAVYPVLVKKGMTSVALYGLGNIRDERLNRMFQTPHSVQWMRPGTQDGESVSDWFNILVLHQNRIKTNPKSAINEHFLPRFLDFVVWGHEHECLIDPQEVPGMGFHITQPGSSVATSLIDGEAKPKHVLLLEIKGNQYRPTKIPLRSVRPFEYAEVVLKDEADVDPNDQASVLEHLDKIVRNLIEKSSQPTASRSEPKLPLVRIKVDYSGFSTINPQRFGQKYVGKVANPQDILIFSKSAKKRQTTGDHIDDSEKLRPEELNQQTIEALVAESNLKMEILPVDDLDIALHDFVNKDDKMAFYSCLQRNLEETRNKLSSEADKSKIEEEDIIVKVNECMQERVKERSLRSKDGTRFTSSSQNLDIGGKSFAAQSSLNSFSDDEDTRDALLGAKSTDVGRKSSGFTRPSKDNADVAKRGASKRGRGRGTSSMKQTTLTFSQSRSTTVIRSEDVSSEEEADANEVVENSEEESAQQVGRKRAAPRGRGRGRGSTAKRGRKTDIASIQSMMSKDDDDSEDEPPKKAPPRVTRNYGAVRRR

SEQ ID NO: 139 - DNA, 3372 bp, Beta vulgaris
ttcaatgacgaagatgggttaaccagttgaacttgagtgagttcacatcactctaccaacaacaattcttccttcaaaaaattcagaaaaaaatcaccccaaatttgcatttcttttccaattacactaagtgtaaaaaagataacacctttataaattataatcagagaagagaaagaaaaagaggagagagaaaaaaaatggcagccccagaaaagccatggaaagcagaatatgcgaaatcagcgagagcagcttgtagaacttgcaaggacaacattggcaaagaaattcttcgttttgggaaaatggttcaatcttctcattttgatggtttcatgcctatgtggcatcatgccacctgcataatgaagaaagcaaatcaaataaaatccattgatgaaatagaaggcgttgaatcacttagatgggaagatcagcagaaaataagaaaatatatagatggtaatggagtggttagtgacgctggtgctgctactcgtgctcctgcagcatatggtattgaagtgtcccaaacatctcgtgctgcatgcaagcgctgcagccaaaagataatcaaaggagaggttcgaatatctgccaagattgatggtaaagctactaaaggtttgtcatggtatcatgctgcttgttatctggagtcatttccttccaccttgctggacagcttatctggatggcagagcctttcatctgatgatcaagcttctcttcaagctacgactaaaggaaaagctccttctgcagaaaccggtcaaactggtgctggaaaatcatcaaaagagccaaaagctagagatggtgttaagcgtaaaagtgctggtgaaagtgatcagcatgccaaaattgtgaaaactgaatctgatatgattatgcgtaaatgtgacagtggggaagctgctttggaaactaaattagaggcccaggccagagcattatgggatctgaaagataatcttaagaaacatgtttcgaatgtggagctgcgacaaatgcttgaagccaatgaccaaagtacatctggttcagagcttgtcttacgggatcgttgtgctgatggcatgatgttcggagcgctcaaaagctgtcctatgtgttctggtcatctttcctattcaggaagcacgtataagtgccatggctttatctcagagtggagcaaatgttcttactctactactcagcctgaaagaattaaagggaagtggaaaatcccggaagagtcagataatcaatatcttgtcaagtggttcaagtcacaaaaagcagctaaacctgttaggatacttccgccttccactcccaacacatctgctgggaatcaaactgctaaagagcaactgaagtcttctaaagatgaaaagttgggggatcttagagttgctattactggattacctaaagaaactgtggaggagtttcgaagcaaaatcgaaggggcaggaggccaggttcatgcaaaaatcaagaaagatacgaattgcttggttgtgggtggcggactgagtgatcaaaattctgaattgaagaaggcaaggaggatgaagatcccagttgttagggaagagtatctggccaattgtatccaaaagcagaagaagcttcccactgacctgtacaagatggaggccactgtggagtcatctagcttggttactgtcaaagttaaagggcgtagtgctgtacatgaagcttctggcctgcaagattctggacacattctggaggaaggacccagcatctataacactacgttaagcctgtctgacctgtcatccggtataaacagttattatatacttcaaatcatacaagatgataagagttcagagtgctatgttttccggaagtggggtcgagttggcaatgacaaaattggaggtaacaaaattgaggagatgtcaaaatcagatgctattcaagaattcaaacgtctatttctggagaaaactgggaatccttgggaagcttgggtccataaacagaatttccagaagcatcctggccgattttttccattggacattgattatggggtgagtaagcaggccccaaagaaaaatatagacgataagaatagcacactagcccctgccttaaaagatttgattaagatgctcttcaatgttgaaacttacagagctgccatgatggagtttgagatcaacttgtctgagatgcctcttgggaaattgagcaagagcaatatccaaaaaggtttcgaggccttgacgcagatacaaaatttgttggaaaatacggcccttcaaactactgctaaggaaagcttgattattgatgccagcaatcgttttttcactgtgataccttctatccatccccatgtaattagagatgaggatgatttcaagtctaaggtcaaaatgctagaagcactccaggacattgaaatagcttccagattggtgggttttgacgtggatagtgatgatcctcttgatgcaaagtataagaaactacgctgtgatatggcacccctaccacatgatagtgaagattatcaattgattgagaagtatcttctcaccactcatgcccccacacatacggactggagacttgaactggaagaagttttctcactcgagagggaaggagaacatgataaatttgcttctcagcgtgagaagcttggcaatagaatgctcctgtggcatggttcccgattgacaaattttgtgggtatccttagccaaggactcagaattgctcctcctgaggctcctgctaccgggtacatgtttggcaaaggggtttactttgctgatcttgtcagcaagagtgcacaatattgctacactgaccgtaaaaatcctgtgggcttgatgctattgagtgaagttgctcttgggcaagtccatgagctcaaaaaggcacagtacatggaaaaacctccaagaggaaaacactccaccaaaggacttggcaagaaggtacctgctgaggcagggtttgcaaaatggaaggatgaagtagttgtgccttgcgggaaaccggtagattccaaagtaaaatcatcagagctcatgtataacgagtacattgtctatgacacagctcaagttaaaatgcagttcttgctgaaggtaaggtttcactacaagaggtaacaagctgccggacgacggactcgttgcagctctgtacagtgttttagttttttcgttgtcgtgacgcttaagagatctcattttgggggttggtggagatcttcgtaatcgtccgtgtatatttgtttttctattgaacccttagcaactactagatgtatcaacatgatggatatctcaaatcttattctagtttttgcctattttgtgacattgctca

SEQ ID NO: 140 - protein, 983 aa, Beta vulgaris
MAAPEKPWKAEYAKSARAACRTCKDNIGKEILRFGKMVQSSHFDGFMPMWHHATCIMKKANQIKSIDEIEGVESLRWEDQQKIRKYIDGNGVVSDAGAATRAPAAYGIEVSQTSRAACKRCSQKIIKGEVRISAKIDGKATKGLSWYHAACYLESFPSTLLDSLSGWQSLSSDDQASLQATTKGKAPSAETGQTGAGKSSKEPKARDGVKRKSAGESDQHAKIVKTESDMIMRKCDSGEAALETKLEAQARALWDLKDNLKKHVSNVELRQMLEANDQSTSGSELVLRDRCADGMMFGALKSCPMCSGHLSYSGSTYKCHGFISEWSKCSYSTTQPERIKGKWKIPEESDNQYLVKWFKSQKAAKPVRILPPSTPNTSAGNQTAKEQLKSSKDEKLGDLRVAITGLPKETVEEFRSKIEGAGGQVHAKIKKDTNCLVVGGGLSDQNSELKKARRMKIPVVREEYLANCIQKQKKLPTDLYKMEATVESSSLVTVKVKGRSAVHEASGLQDSGHILEEGPSIYNTTLSLSDLSSGINSYYILQIIQDDKSSECYVFRKWGRVGNDKIGGNKIEEMSKSDAIQEFKRLFLEKTGNPWEAWVHKQNFQKHPGRFFPLDIDYGVSKQAPKKNIDDKNSTLAPALKDLIKMLFNVETYRAAMMEFEINLSEMPLGKLSKSNIQKGFEALTQIQNLLENTALQTTAKESLIIDASNRFFTVIPSIHPHVIRDEDDFKSKVKMLEALQDIEIASRLVGFDVDSDDPLDAKYKKLRCDMAPLPHDSEDYQLIEKYLLTTHAPTHTDWRLELEEVFSLEREGEHDKFASQREKLGNRMLLWHGSRLTNFVGILSQGLRIAPPEAPATGYMFGKGVYFADLVSKSAQYCYTDRKNPVGLMLLSEVALGQVHELKKAQYMEKPPRGKHSTKGLGKKVPAEAGFAKWKDEVVVPCGKPVDSKVKSSELMYNEYIVYDTAQVKMQFLLKVRFHYKR

SEQ ID NO: 141 - DNA, 3279 bp, Zea mays
gaacccaccttcggcttcctctgtcgtccggcctccaactccatcgaaggggctagggagaggagggaacccgaaccacagcaggccggcgcaatggcggcgccgccaaaggcgtggaaggcggagtatgccaagtctgggcgggcctcgtgcaagtcatgccggtcccctatcgccaaggaccagctccgtcttggcaagatggttcaggcgtcacagttcgacggcttcatgccgatgtggaaccatgccaggtgcatcttcagcaagaagaaccagataaaatccgttgacgatgttgaagggatagatgcacttagatgggatgatcaagagaagatacgaaactacgttgggagtgcctcagctggtacaagttctacagctgctcctcctgagaaatgtacaattgagattgctccatctgcccgtacttcatgtagacgatgcagtgaaaagattacaaaaggatcggtccgtctttcagctaagcttgagagtgaaggtcccaagggtataccatggtatcatgccaactgtttctttgaggtatccccgtctgcaactgttgagaagttctcaggctgggatactttgtccgatgaggataagagaaccatgctcgatcttgttaaaaaagatgttggcaacaatgaacaaaataagggttccaagcgcaagaaaagtgaaaatgatattgatagctacaaatccgccaggttagatgaaagtacatctgaaggtacagtgcgaaacaaagggcaacttgtagacccacgtggttccaatactagttcagctgatatccaactaaagcttaaggagcaaagtgacacactttggaagttaaaggatggacttaagactcatgtatcggctgctgaattaagggatatgcttgaggctaatgggcaggatacatcaggaccagaaaggcacctattggatcgctgtgcggatggaatgctatttggagcgctgggtccttgcccagtctgtgctaatggcatgtactattataatggtcagtaccaatgcagtggtaatgtgtcagagtggtccaagtgtacatactctgccacagaacctgtccgcgttaagaagaagtggcaaattccacatggaacaaagaatgattaccttatgaagtggttcaaatctcaaaaggttaagaaaccagagagggttcttccaccaatgtcacctgagaaatctggaagtaaagcaactcagagaacatcattgctgtcttctaaagggttggataaattaaggttttctgttgtaggacaatcaaaagaagcagcaaatgagtggattgagaagctcaaacttgctggtgccaacttctatgccagggttgtcaaagatattgattgtttaattgcatgtggtgagctcgacaatgaaaatgctgaagtcaggaaagcaaggaggctgaagataccaattgtaagggagggttacattggagaatgtgttaaaaagaacaaaatgctgccatttgatttgtataaactagagaatgccttagagtcctcaaaaggcagtactgtcactgttaaagttaagggccgaagtgctgttcatgagtcctctggtttgcaagatactgctcacattcttgaagatgggaaaagcatatacaatgcaaccttaaacatgtctgacctggcactaggtgtgaacagctactatgtactccagatcattgaacaggatgatgggtctgagtgctacgtatttcgtaagtggggacgggttgggagtgagaaaattggagggcaaaaactggaggagatgtcaaaaactgaggcaatcaaggaattcaaaagattatttcttgagaagactggaaactcatgggaagcttgggaatgtaaaaccaattttcggaagcagcctgggagattttacccacttgatgttgattatggtgttaagaaagcaccaaaacggaaagatatcagtgaaatgaaaagttctcttgctcctcaattgctagaactcatgaagatgcttttcaatgtggagacatatagagctgctatgatggaatttgaaattaatatgtcagaaatgcctcttgggaagctaagcaaggaaaatattgagaaaggatttgaagcattaactgagatacagaatttattgaaggacaccgctgatcaagcactggctgttagagaaagcttaattgttgctgcgagcaatcgctttttcactcttatcccttctattcatcctcatattatacgggatgaggatgatttgatgatcaaagcgaaaatgcttgaagctctgcaggatattgaaattgcttcaaagatagttggcttcgatagcgacagtgatgaatctcttgatgataaatatatgaaacttcactgtgacatcaccccgctggctcacgatagtgaagattacaagttaattgagcagtatctcctcaacacacatgctcctactcacaaggactggtcgctggaactggaggaagttttttcacttgatcgagatggagaacttaataagtactcaagatataaaaataatctgcataacaagatgctattatggcacggttcaaggttgacgaattttgtgggaattcttagtcaagggctaagaattgcacctcctgaggcacctgttactggctatatgttcggcaaaggcctctactttgcagatctagtaagcaagagcgcacaatactgttatgtggataggaataatcctgtaggtttgatgcttctttctgaggttgctttaggagacatgtatgaactaaagaaagccacgtccatggacaaacctccaagagggaagcattcgaccaagggattaggcaaaaccgtgccactggagtcagagtttgtgaagtggagggatgatgtcgtagttccctgcggcaagccggtgccatcatcaattaggagctctgaactcatgtacaatgagtacatcgtctacaacacatcccaggtgaagatgcagttcttgctgaaggtgcgtttccatcacaagaggtagctgggagactaggcaagtagagttggaaggtagagaagcagagttaggcgatgcctcttttggtattattagtaagcctggcatgtatttatgggtgctcgcgcttgatccattttggtaagtgttgcttgggcatcagcgcgaatagcaccaatcacacacttttacctaatgacgttttactgtataaatctaccaggagtgagtaatttatatattagcgggacaaaaaaaaaaaaaaaa

SEQ ID NO: 142 - protein, 980 aa, Zea mays
MAAPPKAWKAEYAKSGRASCKSCRSPIAKDQLRLGKMVQASQFDGFMPMWNHARCIFSKKNQIKSVDDVEGIDALRWDDQEKIRNYVGSASAGTSSTAAPPEKCTIEIAPSARTSCRRCSEKITKGSVRLSAKLESEGPKGIPWYHANCFFEVSPSATVEKFSGWDTLSDEDKRTMLDLVKKDVGNNEQNKGSKRKKSENDIDSYKSARLDESTSEGTVRNKGQLVDPRGSNTSSADIQLKLKEQSDTLWKLKDGLKTHVSAAELRDMLEANGQDTSGPERHLLDRCADGMLFGALGPCPVCANGMYYYNGQYQCSGNVSEWSKCTYSATEPVRVKKKWQIPHGTKNDYLMKWFKSQKVKKPERVLPPMSPEKSGSKATQRTSLLSSKGLDKLRFSVVGQSKEAANEWIEKLKLAGANFYARVVKDIDCLIACGELDNENAEVRKARRLKIPIVREGYIGECVKKNKMLPFDLYKLENALESSKGSTVTVKVKGRSAVHESSGLQDTAHILEDGKSIYNATLNMSDLALGVNSYYVLQIIEQDDGSECYVFRKWGRVGSEKIGGQKLEEMSKTEAIKEFKRLFLEKTGNSWEAWECKTNFRKQPGRFYPLDVDYGVKKAPKRKDISEMKSSLAPQLLELMKMLFNVETYRAAMMEFEINMSEMPLGKLSKENIEKGFEALTEIQNLLKDTADQALAVRESLIVAASNRFFTLIPSIHPHIIRDEDDLMIKAKMLEALQDIEIASKIVGFDSDSDESLDDKYMKLHCDITPLAHDSEDYKLIEQYLLNTHAPTHKDWSLELEEVFSLDRDGELNKYSRYKNNLHNKMLLWHGSRLTNFVGILSQGLRIAPPEAPVTGYMFGKGLYFADLVSKSAQYCYVDRNNPVGLMLLSEVALGDMYELKKATSMDKPPRGKHSTKGLGKTVPLESEFVKWRDDVVVPCGKPVPSSIRSSELMYNEYIVYNTSQVKMQFLLKVRFHHKR

SEQ ID NO: 143 - DNA, 3353 bp, Brassica napus
ctttttagccttttagggttaaaagcctcgccggtgaaaaaaaaggggaaaacagtagaaaacacacaatctgcacaacaagaggcgtcaccaagaagccatcctcgtcgtcttcttcttcttcttcttcgcgcgagaggcgtatgtacaaatagtcctcctcacactgtgttacctgagagagaaagagaaatggcgagcccagataagccgtggagggctgagtatgcaaagtcctcgaggtcttcctgcaagtcttgcaagtcccccatcaacaaggagacctttcgccttggaaagcttgttcaagctactcaattcgatggcgtcatgcccatgtggcaccatgcttcttgtatactcaagaaaaccaagcagattaaatcagctgatgatgttgaaggcttagaatctcttcgttgggaagatcagcaaaagattagacaatatgtcgaatctggagcagggaatagcactagcacgggaacgagcacggccagtagcggtggcaatgccaagctagaatatgggattgaagtttcacaaacttctcgtgctgggtgcagaaagtgcagcgagaaaatcttgaaaggagaggtacgtatattctctaagcctgaaggcccgggtaacaagggtttgatgtggcaccacgcaagatgtttccttggaacgtctccctctactgaactgaaaagtttgtctgggtggggaagcatacctgactcagatcaagaagctcttcttcccttggtgaagaaagatcagccagcagccaaaactgcaggcacaaaaaggagaaatgattctgatgacaacgagaagtcgaaacaagctaagactatgtctgcaagcggtgctttacaaccttgtagcaaagacaaggaaatggaggcacaaagtaaggaactgtggaacctgaaggatgacctgaaaaaacatgtgacaacagctgagttgcgggagatgcttgaaataaatgaacgaagtacaagaggatcagaacttgatctgcgggataagtgtgctgatggcatgatgtttggtccactcgctctctgccctgtttgctctggtcatgtttctttttctggaggaatttaccgatgcaatggttacatatcggaatggagcaaatgttcccatgccagttctgatccagaccgcatcaaagggaagtggaaaatccccgaggaaacagaaaatcagttccttgtgaagtggaataagtcgcaaaagagtgtgaagccaaaacgtattttgaaccctatatcgcccgcgggaacatcccagggtcaaggttctaaagctgcagctgactcctcaaggagtgaaaagctggaggatcttagagtttcaattgccggatcctctaaggaacgccaagcatggaagaagaaaattgaggaagccggtgcagagtttcatgctaaagttaaaaaaggtacaagctgtttggttgtctgtggccagacagatatggaagatgctgaaatgagaaaagcaaggaggatgaaggtcgcagtcgttagagaggattatttggttgactgttttacaaagcagaggaagcttccatttgacaagtacaaaattgaagacgctggtgagggcatggtcactgttaaagtaaaagggcgaagtgctgtgcatgaagcctctggcctccaagagcactgccacatccttgaagatgggaacagtatctataacacaactctgagcatgtctgatctttctaccggtatcaatagttattacatactccagataatccaagaagataaaggttcagattgctacgtgtttcgtaaatggggccgcgttggaaatgaaaagattggaggtaacaaactggaggagatggaaaagtctgatgcagttcacgaattcaaacgtctatttcttgaaaagactgcaaacacatgggaatcttgggaacaaaaaacgaatttccagaagcagccagggaaatttctaccgttggacattgattatggagtaaacaagcaagtagcaaagaaagaatcagttcagaccattagcaatcttgctcctccattagtagaattgatgaagatcctttttgatgtggaaacatacagaactgctatgatggagttcgagataaacatgtcggagatgccacttgggaaactcagcaaacataatatacagaagggttttgaggcattgacagagatacagaagctgttgactgaaagcgacccccaaccttctgtcaaagaaaacttgcttgttgatgctagcaatagattttttacgatgatcccttcagttcatcctcatattatccgagatgaagatgactttaagtcaaaggtgaaaatgctcgaggcgctgcaggacatcgaaatagcgtcaagattagttggctttgatactgatagcactgaatctctggatgataaatataagaaattgcattgcgatatttcaccactttctcatgatagtgaggactatcggttgattgagaagtatctcaacacaactcatgccccaacacatacggagtggagccttgaactggaggaagtttttgccctcgaaagagaaggagagtttgataaatatgctccgcacagggaaaaacttggcaataagatgctcctatggcatggttctcggttaacgaattttgttggaattttgaaccaaggactgagaattgcgcctccagaagctcctgctactggctacatgtttggcaaggggatttactttgctgaccttgtcagtaaaagtgctcagtactgcttcacttctaaggaaaacccggtgggtctaatgcttctgagcgaagttgcattgggagaaatacatgagctaacaaaagccaagtacatggataaaccaccgagggggaaacactcgaccaaagggcttggcaagaaagtgcctcaggattcagagtttgccaagtggagagatgatgtgacagttccttgtggaaaacctgttccatctaaggccaaggcttctgagcttatgtacaacgagtatatcgtctacaatacagcccaggtgaagttgcagttcttgttgaaagtacggttcaagcacaagagatgatttcgtaacaaacaggaagacgaccttttgtaatgtcttttaggacatcaaaaaccaacatgaagacaaaattttgtaactagatcggattgtctctctggctttgtagttgtctggttggaaaacagccatttcactttgttatgatcttgctcagtaaacgctactcttttgggtcacttgtttaaaactaatgttgtttctatgaaggatcgttgaagaaacagttaaatccaaagagaaaaatggttggtgga

SEQ ID NO: 144 - protein, 967 aa, Brassica napus
MASPDKPWRAEYAKSSRSSCKSCKSPINKETFRLGKLVQATQFDGVMPMWHHASCILKKTKQIKSADDVEGLESLRWEDQQKIRQYVESGAGNSTSTGTSTASSGGNAKLEYGIEVSQTSRAGCRKCSEKILKGEVRIFSKPEGPGNKGLMWHHARCFLGTSPSTELKSLSGWGSIPDSDQEALLPLVKKDQPAAKTAGTKRRNDSDDNEKSKQAKTMSASGALQPCSKDKEMEAQSKELWNLKDDLKKHVTTAELREMLEINERSTRGSELDLRDKCADGMMFGPLALCPVCSGHVSFSGGIYRCNGYISEWSKCSHASSDPDRIKGKWKIPEETENQFLVKWNKSQKSVKPKRILNPISPAGTSQGQGSKAAADSSRSEKLEDLRVSIAGSSKERQAWKKKIEEAGAEFHAKVKKGTSCLVVCGQTDMEDAEMRKARRMKVAVVREDYLVDCFTKQRKLPFDKYKIEDAGEGMVTVKVKGRSAVHEASGLQEHCHILEDGNSIYNTTLSMSDLSTGINSYYILQIIQEDKGSDCYVFRKWGRVGNEKIGGNKLEEMEKSDAVHEFKRLFLEKTANTWESWEQKTNFQKQPGKFLPLDIDYGVNKQVAKKESVQTISNLAPPLVELMKILFDVETYRTAMMEFEINMSEMPLGKLSKHNIQKGFEALTEIQKLLTESDPQPSVKENLLVDASNRFFTMIPSVHPHIIRDEDDFKSKVKMLEALQDIEIASRLVGFDTDSTESLDDKYKKLHCDISPLSHDSEDYRLIEKYLNTTHAPTHTEWSLELEEVFALEREGEFDKYAPHREKLGNKMLLWHGSRLTNFVGILNQGLRIAPPEAPATGYMFGKGIYFADLVSKSAQYCFTSKENPVGLMLLSEVALGEIHELTKAKYMDKPPRGKHSTKGLGKKVPQDSEFAKWRDDVTVPCGKPVPSKAKASELMYNEYIVYNTAQVKLQFLLKVRFKHKR

SEQ ID NO: 145 - DNA, 3276 bp, Helianthus annuus
attccagaaacaataatattcaagaatcgacgaaaagcacatttattgattaccccttttctcttctcaaacaagagtaagcaacacagtgacatcgaaagagggaaaatggcgactcctccaaagccatggaaggctgaatatgcaaaatccggaagatcttcgtgtagaacatgcaagacccctatcgacaaagaaatcttgcgtcttggcaagatggttcagtcccaacaattcgacggtttcatgcctatgtggaatcatgctcggtgcatactgaagaaggcgaaacagataaaatcctgtgacgatgtggaaggcattgaaacacttcgttgggaagatcagcagaaaataagagaatatgttgaaagtggaggagccgggtcctcgagtacgcctacaagtacacctgctcgttctgctgctagtaaatgtgcaattgaagtttcgaaaacggctcgtgctacttgtaagatctgcagtgaaaagattttgacaggacaggttcgtatatctagtaagccggagggtcaaggtgctagaggtttagcatggcatcatgctacatgtttcatggattcttctccaactactcaacttgaaacgttggacgggtgggaaaatctgccggattcagataagtcaactatcggttcaatggttaaaaagctttcaacaaccaaaaaagatgaagtgaaggaggaaaaggagactctaaatggaagctctaagcgtaaaggagcagttgaccgtgaccacaagtcaaagatgcctaagattgaagactctccttcgaatgcaaaaacatcagtggacggtgaattggacccgtctaaattgcgtagtctattagaggcccaaacaaaagaattatgggctctgaaagatgatctcaaaaaacatgtatcaacatcagagttacgggaaatgttggaagctaataaccaagattcatcaggatcggaactcgacctgcgtgaccgttgtgctgatgggatgctatttggagcacttaaaccatgtgaactttgttccgggcctcttcactattctggcggtacgtataaatgcaaagggtttctaaacgaatggagcaagtgcgcgttttccactaccgaacctgaacgcgtaaaaggaaaatggaacattccggaagaaactaaaaaccaatatctgaacaagtggttcaagacacaaaagacgaaaaagcctgttaggataatgcctccaccttcatctagcactcctggaaagcaagctagtactgtaacgactcagtcatctcacagtgaaatattgggagatctgaaagtgtcggttatcggtttctcatctaaagctatggatgaatggaagaacaaaattctgagcgagggagctcagtttcatccgaaaattaagaaagacacaaactgcttagttgtaagtggagtcccagataatctgaatgctgagatgaagaaggcaaggaggatgaaaatacctattgtgagggaggattatctggtcgactgctttgaaagaaagaaaaaactccgttttgatttgtataaactcgaaaccaacgaagaggctaacaaaagcatggtcaccgtaaaagtcaaagggcggagcgcggtgcatgaagcatctggtttgcaagatacgggtcatattttagagcacggaaaaagcatctataatacaactcttagcttatcggatctatccactggtattaacagttattatatccttcagattatcgaagatgataaaggctcaggctgccatgtattccgaaagtggggtcgtgttggcaatgaaaaaatcggtgggaccaagttggaagagatgtgtaaagaagacgcaattcacgaattcaaacggttattccttgaaaaaaccgggaattcatgggagtcttgggaaaaaaagacgcttcaaaaacaacccggacgattttaccccttggaaattgattacggtgtgagcaaagattcgattcagagaaacaaacttaaagatgctaaaagtcaacttgctcccccgttagcagagttgatgaagatgttgtttaacgtggaaacataccgggctgcaatgatggaatttgaaataaatatggcggaaatgccccttgggaagcttagcaaaagcaatattcagaaaggttttgaagtattgactgagcttcaggatctattaaacaagtcaactgacaaccctgcagtcaaagaaagcatgattgttgccgccagcaaccggttttttacagttattccttcggttcatccacatgtaatcaaagatgaagatgactttaaattgaaggttaaaatgttggaagcgcttcaagatatcgaaatagcttcaaggctagtagggtttgatgtcgacaacgatgattcccttgatgataaatacaaaaagcttcaatgtgacatggtcccacttcctcacgactctgaagattatcggttagttgagaaatatctccagacaacacatgcccctacacatacggattgggcacttgaacttgaagaagtttttacagttgaacgacgaggggagtttgataagttttctccatataaaaataaactcaagaacaagatgctcctttggcacggttctcggttgacaaactttgttggtatcttaagccaaggattgcgaatagcccctcctgaagctcctgcaacgggttatatgtttggcaaagggatttattttgccgacttggtgagtaaaagtgctcaatattgttttaccgacaagaaaaacccggtgggtttgatgctactaagtgaagtcgctttaggggagatgtacgagctaaagaaggccaagtacatcgacaaacctccaaaagggaagcactcgactaaagggcttggcaagaacatacctaatgcgtcggaacaccttaactggaaagatgatgtcatcgtgccatgtggcaaacccgtaccgtcaaatgttaaggcgactgaattgatgtataatgaatacatcgtctacaacactgatcaagttaagctgcagttcttgctgaaggtgcggtttcatcacaagaggtaagacggaaaaacgcaagaactgtacaaatatggtaatgttttgtttttcgaagtttagcagctaattgcttaatgatctcgttttgtggtttgtttggagatctcaagcaaaacttattagttattagtattgtacttgcaaatacttttgaaaccgtagtgacttctaagctgcctatttttgttcaaattccgtgaaaacgggcca

SEQ ID NO: 146 - protein, 986 aa, Helianthus annuus
MATPPKPWKAEYAKSGRSSCRTCKTPIDKEILRLGKMVQSQQFDGFMPMWNHARCILKKAKQIKSCDDVEGIETLRWEDQQKIREYVESGGAGSSSTPTSTPARSAASKCAIEVSKTARATCKICSEKILTGQVRISSKPEGQGARGLAWHHATCFMDSSPTTQLETLDGWENLPDSDKSTIGSMVKKLSTTKKDEVKEEKETLNGSSKRKGAVDRDHKSKMPKIEDSPSNAKTSVDGELDPSKLRSLLEAQTKELWALKDDLKKHVSTSELREMLEANNQDSSGSELDLRDRCADGMLFGALKPCELCSGPLHYSGGTYKCKGFLNEWSKCAFSTTEPERVKGKWNIPEETKNQYLNKWFKTQKTKKPVRIMPPPSSSTPGKQASTVTTQSSHSEILGDLKVSVIGFSSKAMDEWKNKILSEGAQFHPKIKKDTNCLVVSGVPDNLNAEMKKARRMKIPIVREDYLVDCFERKKKLRFDLYKLETNEEANKSMVTVKVKGRSAVHEASGLQDTGHILEHGKSIYNTTLSLSDLSTGINSYYILQIIEDDKGSGCHVFRKWGRVGNEKIGGTKLEEMCKEDAIHEFKRLFLEKTGNSWESWEKKTLQKQPGRFYPLEIDYGVSKDSIQRNKLKDAKSQLAPPLAELMKMLFNVETYRAAMMEFEINMAEMPLGKLSKSNIQKGFEVLTELQDLLNKSTDNPAVKESMIVAASNRFFTVIPSVHPHVIKDEDDFKLKVKMLEALQDIEIASRLVGFDVDNDDSLDDKYKKLQCDMVPLPHDSEDYRLVEKYLQTTHAPTHTDWALELEEVFTVERRGEFDKFSPYKNKLKNKMLLWHGSRLTNFVGILSQGLRIAPPEAPATGYMFGKGIYFADLVSKSAQYCFTDKKNPVGLMLLSEVALGEMYELKKAKYIDKPPKGKHSTKGLGKNIPNASEHLNWKDDVIVPCGKPVPSNVKATELMYNEYIVYNTDQVKLQFLLKVRFHHKR

SEQ ID NO: 147 - DNA, 3157 bp, Hordeum vulgare
gacggtggctcacttgaaagccaaggagcgtcaccgccttcgggaaagaatcgaagtcgaaccacccaccccgccgccgtcccccgcccccgagtttcggccaaaccgagagcgcgtcctgcgggcgggagagggaggcgcacgccgtcgacgtccctgcggccgccgcgcccggcgcccgtccaacccccgtcgcgggcatccgctcggtaccatctctctctccccgcctctcgtgcacggcatccatccatggatcctcctgaaactgcatccgaggctcccccgcgccgcgctcggttccgtggcgccccgccgcgcgcgcgcactcccggatccgccttccggctctcgatctggctccttggggtcaagattttgccggttgcggtaggattcctctaacctgccgttgactgacttttgggatggtacgtcgctcttttggctgcacggcatgcttgctgttttggttcatgcttggcccgcctggacggccgaggttgcacggaattggcaatgctggctttctcaggtgtcacctccaggcctctagattctagcgatgtctgtaccgaagttttgatttccttttccgcgagaaaagatagtgcacccttccactcgttcctttggattttcctgcttgtgggcgtacatgggacaatgctaacatttctggcctcatccataataaggaggtgaaatctgtgatggacagactcgtgctactgccacggtgagatggctatccgttgacgttgtgccattcacagacataatcacggaaaaatgcagtctctgcagttccagaaaagggtaggattccttaaccaggccttccctacatgttcccttagcagaagagaacaagttttgacgttgtgatacgctcaagggcactgaaaagaaccatgttcagatttgaatttacctattctagcaacgttgttgttctggacaaaatccatttgatgcttcttttgaacactcgcttgtcagtagtcactaccataaggtaagacgagctaatggtaggagctatcaggtatccggtcccagtagcataaggtaagctctactaaaacccggcctgcgtgggaaagacagctcccgcggtatttttaaaaggcaagaaactccccaaaatgctgcgcatgggcgctcaatctcagacagaataataagccaagacggagaaactagtactgctaaatttaaatttattagtactacaagttcatcttgtgatatttaaattctctgttctagcaacgttgttgttggggtcaaaattcatttgctgcttcttttgaacacttgcttctcagtagcataagataagcctgaatggtaggagctatcaggcacccgttctcggtagcataaggtaagctctaataaaactcggcctgcgcgggaaagacagctcctacggtatttttacaaggcaagaaacccccagaacgcggcatgtggctgctcaacctcacacggggagcggatgctgtgcgtgtcagcgagggggattttttatgtaagacccagaatttagcagcgttagattcggggtaaaaaatccatttgctgcttctttttaacactcgtttctcagtagcataaggtaagcagtaattgtatgagctatcaggcacccgttctcagtaccataacgtaaactctaataaaactcgttttgggcgggaaagatagtcccgcgttttttctaaaggcaagaaaccccaagaacgcggcacgtgcctgctcatcctcacgcgtggagctgacgctgcacatgccagtgagggggattttttttatgcgagacccaggctttgtacatgggtcgaccaccccactataggaggcgttaccaccgcgctatcaacatgtgtgttgatgcaagcgctaatggtaggagctatcgagtaacccattgtccaagttaccaagtcacaaatactcttaactgcaatcacactgtgcgaaaatcatatgggaaaataactctgaccaaatatgctaatgcgatatacattatatggcagacaaagaaaacaacctcagataaagaaggtaatgctgaatttctaccattctttatgatgtaggacaacaaagttagaaaatatacattagccaatttactatatcggggattaactgtgatgtatttccattgagccaggcactattagagctgcctgttgctcttctgaagctatctcgtttttttttaaacagaggtaatatatttgcctcatggattaataaggagaagctatctcagatttcagggattaactatgatgaatttccatcatgcaggcacgctagagctgcctgttacttttctgaagctatctcagatttcagggttctgcaaggtttaacgtttgtttgactgatctccttggctccttgtgcttataactctgatacgttagatgtcagtattgtctcgtggatgtggcgttgtttcttcttcataaacacgatatgactaatttgttgtgtgcctattaaaagtggattaattgaatctggattcacattttccaggtaggaaagcgagtcctgaaatgggccacgctccgaggaggttggtctctgccctctttataaagccaccctgggtgcccgttgaagtgagaataggccagaagtggagacgagcaaatgttttaaggcaagccgaccgcaggggactctgtcttgtgagcattagagggccagcacctgagtctgaccctataatggtaccactatcaacgatccggataccttccaaccctcctgttgccaggaaaaaaccagacacccgccctaatttccgggtgaagaagcccagggacgctggtgacgccaccgaaggcggtagcgagtaggctgctgctggctgttcattcgctgtgttgataacttatgcttgatctgtatgtaagttggaaaagaagtactccctctctaaactaatataagagcgtttagattactaaaatagtgttctaaatgctcttatattagtttacggagggaatatttttcttcttcatcggcagatgttgtgatgtgtgattctgtttgaaacaaaatgtctgaacgtattactgcagttcagaattgttttatcgtcagaaaatcagaggttcaaagc

SEQ ID NO: 148 - protein, 985 aa, Hordeum vulgare
MAAAPPKAWKAEYAKSGRSSCKSCKSPIAKDALRLGKMVQATQFDGFMPMWNHAKCIFNKKNQIKSVDDVEGIDALRWDDQEKIRNYAANSSTTSTATATATASSTAAIPDKCAIEVAQSARASCKRCSEKIAKGNVRVSSKLDGQGWYHVNCFLEMSPSASVEKFPGWETLSHDDRGAIIDVVKKGAASKQETTSKGSKRKIGDIDTHNSKAPNLNGSISEGAARSKGKLVVPCDPNSSSDDLHQKLKEQSDTLWKLKDELKKHVSTAELRDMLEVNEQDPSGPERDLLERCADGMLFGALGTCPVCNSCLYYYGGHYQCNGHVSEWSKCTYMTTEPVRIKKKWKIPDEIKNDYLTKWFKSQKVKKPERILPPMSPQKSVGQSPQQSFVGEALDKLRVCIVGQSKDVADEWKQKLKLAGAHFSPRVTKDINCVVSCGGLDNESAEVRKARRQKIPIVKEDYLGECIRKNRVLPFDLYKVATTLEESSKGSTVTVKVKGRSAVHEASGLQDTGHILEDGKSIYNTTLNISDMTQGVNSYYILQIIEEDDGSECYVFRKWGRVGSEKIGGKKLEEMSKTDAIHEFKRLFLEKTGNPWEAWEQKTNFQKQPGRFYPLDIDYGVKQAPKRKDISKMKSSLAPQVLELMMMLFNVETYRAAMMEFEINMAEMPLGKLSKENIQKGFEALTEIQNLLDDTGNQELALRESLIVAASNRFFTLIPSVHPHIIHDKDDLTMKAKMLEALQDIEIASKLVGFDGDNDESLDDKYKKLHCNITPLAHDSEDYKLVEKYLLNTHAPTHKDWSLELEEVYVLDRDGEGNKYSRYKNNLHNKMLLWHGSRLTNFIGILSQGLRIAPPEAPVTGYMFGKGLYFADLVSKSAQYCYVDRKNPTGLMLLSEVALGDMHELKKATPMDKPPRGKHSTKGLGKTVPLESEFVKWRDDVVVPCGKPVPASIRASELLYNEYIVYNTAQVKMQFLLKVKFRHKR

SEQ ID NO: 149 - DNA, 2890 bp, Triticum aestivum
gggctcctccatctcaccgcaatccggccaccatggtacacgagacaagatcacggactcatgcggctgaagaagggaaagatgccccaaaaaggcagaaggaagagcacaaagagcaggaaggggggaaggagcggccctccaagaacaagaagccggccgagccagaggcaccaaccaagaccaagaagctcaagggtggggagtcggagctagatgggaaggaaaactcgacgaaagagtacacagatttctgcaaggccataagagagcacctctctgtggaggacatgcgcaagatcctcgaagccaacgggcaagacgcttccggatcagaagatgcagttgttccaagctgtgaggatatgatgttttacgggccgcttgagaagtgcccaacatgtggtggccagcttgagtgcaaggggtggaagtacaagtgcactggtaaatacagtgagtgggcaagctgcattttcagcagcagcaatcctccaaggaaatctgatcctataaaggtgccggaggaaatcaacaatgattatgtgaacaagtggctgaagcagcaagaagggaaggggtaccctaagcgtgatgtggacgaagaggcccatatcttctcgggcatgatgatcgcattatctggacggatgtcgcgctcacacgcttatttcaaggagcagattctgaaccatggagggcaagtgaataattctgtgcttggtgtcacatgtgtagttgcttctccagccgagagagacaaggggggctcaggaggatttgctgaagcactggagcgtggaactccagtagtgagtgagaactggatagttgatagcattcagaagaaggaagcccagcctttggctgcttatgatattgtatcggatgttgttccggagggcagaggactgccactggataagcttgatccaagcgaggaggccatcgagactttggctgcagagctgaaacttgctggcaaaagatcggtgcacaaggactctaaactggacaaagacggtgggcatatcttcgagaaggatggcatcatctataactgcgcctgttcggtttgcgacttagggtctgagatgaatcagttctgcattatgcagctgatcatgctacctgaaaaacacctgcacctcttctacaagaagggtccaattggccatgatcagatggcagaggaacgggtcgaggattttggtaatcgtgtcaatgatgctatcaaggaatttgctcgtctgtttgaggaagttactggagatgagttcgagccatgggagagagaaaagaagtttgagaagaagagcatgaagatgtaccccttagacatggatgtcggtttcgacgtgcgtcatggaggtgcagcacttcgtcaactgggagctgcagcagcacactgcaagcttgaccctgctatttcttttcttctaaagcaattgtgcggccaagaaatatacaggtatgctctgacagagatggcccaggatctgcctgaccttcctgttgggatgcttacggatctccatttgaagagaggggaggaagtgctacttgaatggatccgagacgcggaagcagtgccggagtccggccctgctgctgatgcattgtggatagagataagcaacaagtggttcaccctgttccccacaactcggccatatataatgagggggtttgaacagattgccgacaatgtggcctctggtttcgagacgatccgcgatataaatgttgcgtctcatctcataggagatgtttttgggtcaaccttagatgatccgctgtctgaatgctacaagaagctgggttgttcaatcaacagcgttcctgaagattcagatgattacaagatgattgtcaagtacctggagaaaacgtacgagccggtcaaggttgacgacgtggtctatggcgtgtcggtggatcggatatatgccgttgagtccagtgcattcccttcttatgaagaaataaagaaactgccaaacaaagttcttctctggtgtggaactaggagctcgaacctgctcaggcatctgcataaaggattcatgcctgctgtttgtcatctgcctgtgcccggatacatgtttggtcgagccatagtctgttcggacgcggcggctgaagctgctcgttatggctatacggcggtggaccgtccagagggatacctggtcttggcagtggcctctctgggggaagagatcaaggagataacgggcacaccaggagcagaggatgtgaaatccctggaggagaagaagcttggcgtgaagggggtggggaggaagacgacggacgagtcggagcacctcacctggagggacgacgtcaaggtgccctgcggcaagctggtgccctcggggaacgaggacggccctctcgagtacaacgagttcgccgtgtatgacccgaagcaggtgagcatccagttcctggtcggggtgaggtacgaggagcagaacatggaggtggtgccggacgagtgaagcgtccgccctcgggcctccggtcatggcggcgtccggccgcggtcaggtcgacggttccctgtattttggaacgctttagtggtagtggtagtgaccgtttaacggtcgtgtgatcggcgcggcgatgtagttcggcgatgatgtcggtggcctgtgtcccattttgggctgcctccaggtttcgtccccgttgccgccggttagtaggcgttgttgggtaacatggaggtaggaggaacgcttgtggttgtagtagctgaacatgttgtgcctgtatatatgtctgtagcagaatgtgtgtatgtatgtatgtatctgccagctggggtcctggtgccgtggtgcacgtagcaggaatgcaaaaaaaaaaaaaaaaacga

SEQ ID NO: 150 - protein, 734 aa, Triticum aestivum
MSAKLRVEELRAELQRRGLDASGTKPALVLRLDAAIREEGKEAASAAEICNVDGIDGVVMDGKAEGKSKRKRKRHGEGENEEENDILDAAKLQSMGYRELQALAKARGLNANGGKKDVLQRLLSSPATSVVDRGVQDKKEVAQADDGKVEELKKKKIVTDVMLDAAQLQGMGYRELQALAKARGLAANGIKKDVIERLLSTPANSVAVADGGFQDKKKLAKGGVGEVEEEVKKEKIVKATKKGAAVLDEHIPDDIKMTYHVLQVGDEIYDATLNQTNVGDNNNKYYIIQALESDAGGSFMVFNRWGRVGARGQQKLHPCSTRDEAIDEFEGKFEDKTKNSWSDRKNFERYAKKYTWLEMDYGEVDKETTQVQKKGSITDQIKETKLETRTAQFISLICNISMMKQQMMEIGYNADKLPLGKLSKSTILKGYDVLKRISNVISRADRRQLEQLTGEFYTVIPHDFGFKKMREFLIDTPQKLKAKLEMVEALGEIEIATKLLEDDSSDQEDPLYARYKQLHCDFTPLEVHSKEYSMIKTYLTNTHGKTHSGYTIDILQMFKVSRHGETERFQKFASAGNRMLLWHGSRLSNWAGIFSQGLRIAPPEAPVTGYMFGKGVYFADMFSKSANYCYASQTSRSGVLLLCEVALGDMNELLNAKYDADSLPKGKLSTKGVGQMAPAESKVTEDGVVVPLGKPKEEPSKRGSLLYNEYIVYNVEQIRMRYVLHVSFNFKGGR

SEQ ID NO: 151 - DNA, 1278 bp, Secale cereale
atggaacttttattgatcaccatcgtaaatgttgtcgcatcgcttttgccatcacagtcgacattgatgtcagcgtcatttatctggttgatcatgctgaggggtggcggctgctgctactatatacttcagatcatcgaagaggatgatgggagtgaatgctatgtatttcgaaagtggggacgagttggcagtgaaaagattggtggaaagaaactggaggagatgtcaaaaactgacgcaatacgtgaatttaaaagattatttctggaaaagactggaaacccctgggaagcatgggaacaaaaaacaaattttcagaagcagcctgggagattttacccacttgacattgattacggagtaagggaagcaccaaaacggaaagacatgagcaaagtgaaaagttcacttgcacctcaggtgctggaactcatgatgatgcttttcaatgttgaaacatatagggctgctatgatggaatttgaaatcaatatggcagaaatgccccttgggaaattaagcaagcaaaatatccagaaaggatttgaagcattaactgagatacagaatctactggatgacactggcaatcaagaactggctcttagagagagcttgattgttgctgcaagcaatcgtttcttcactcttattccttctgtccatccacatattatacgtgataaggatgacttgacaatgaaagcgaaaatgctcgaagcccttcaggatattgaaattgcttctaaactagttggttttgatggtgacaatgatgaatctcttgatgataagtacaaaaaacttcattgtgacatcaccccgctatctcatgatagtgaagattacaagctggtcgagaaatatctcctcaacacacatgctcctactcacaaggactggtcattggaattagaggaagtttatgtgcttgatcgagatggggaaggcaacaagtactcaagatataagaataatctccataacaagatgctattatggcatggttcaaggctgacaaattttattggaattcttagtcaaggactaaggatagcacctcctgaggctcctgtgacaggctatatgtttggcaaaggcctctacttcgcagatttagtaagcaagagtgcacagtattgttatgtggatagaaaaaatccaactggcttgatgcttctttctgaagttgctctaggagacatgcatgaactgaaaaaagccacgcaaaaagaaagaaactcaatgagatattttttgcatggttattctgat

SEQ ID NO: 152 - protein, 426 aa, Secale cereale
MELLLITIVNVVASLLPSQSTLMSASFIWLIMLRGGGCCYYILQIIEEDDGSECYVFRKWGRVGSEKIGGKKLEEMSKTDAIREFKRLFLEKTGNPWEAWEQKTNFQKQPGRFYPLDIDYGVREAPKRKDMSKVKSSLAPQVLELMMMLFNVETYRAAMMEFEINMAEMPLGKLSKQNIQKGFEALTEIQNLLDDTGNQELALRESLIVAASNRFFTLIPSVHPHIIRDKDDLTMKAKMLEALQDIEIASKLVGFDGDNDESLDDKYKKLHCDITPLSHDSEDYKLVEKYLLNTHAPTHKDWSLELEEVYVLDRDGEGNKYSRYKNNLHNKMLLWHGSRLTNFIGILSQGLRIAPPEAPVTGYMFGKGLYFADLVSKSAQYCYVDRKNPTGLMLLSEVALGDMHELKKATQKERNSMRYFLHGYSD

SEQ ID NO: 153 - DNA, 3394 bp, Oryza sativa
catcaggcctttcccttccctttctcctttctcgttgtgtgggttctttctaggccctaggacaagccaagaagcggcggaggggaagggaggaagagggcaccagccgcaccggccggcggaatggcggcgccgcccaaggcctggaaggcggagtacgccaagtccgggcggtcctcgtgcaagtcgtgcaggtcccccatcgggaaggaccagctccggctcggcaagatggtccaggccacgcagttcgacggattaatgcccatgtggaaccatgccagttgcatcctcagtaagaaaaaccagataaaatctgttgatgatgttgaaggaatagacacactcagatgggatgaccaagagaagataagaaattatgttggaagtgcaccagctactgcaagttctgcagctgctatttcagataaatgcaccattgaggttgctaaatctgcccgtacttcctgtagacggtgtggtgaaaagataaaaaagggaacggttcgtgtttcatctaagcttgaagggcaaggttggtatcacgccagctgttttctggagatgtccccagctgcaactgttgagaatttctcaggctgggagatcctgtcgcatgaggataaaagagctgttcttgatcttgttaagaaagatgcccccagctcagggcaaacatcttctaagggttccaagcgcaagaataatcagaatgatatacacgactgcaaagctcccaagataatcaggagtatatcagaaggcacagcagaagataaagggaaagctgttgtatcacatgattccaatgctaattcttctgatcttcaagaaaagcttaaagagcagagtgacacactttggaaattgaaggatgaacttaagaagcatgtgtcaactgctgaactaaggaacatgctcgaagcaaatgggcaggatacatctgggccagagcggcatctattagaccgttgtgctgatgggatgctttttggagcattgggtacttgcccagtttgttctagcttcctatactatcatggtggccagtatcattgcagtggctatgtgtcagaatggtccaagtgtacatactctacgacagaacccgtgcgcagtaaaaagaaatggaaaattcctgacgaaatggataatggttatcttacaaagtggttcaagtctcaaaaggctaagaaaccagagagagttcttccgccaatgtcacctgagaaatcattgtgccaatcaacccagcaaaaccgatctttccttagtgaaggactggataaattgagagtttctatagtaggacaatctaaagatgtggttgatggatggaaacagaagctgaaagatgctggtgccaactttaatgccacagttaccaaagacagcagctgcttagttttatgtagtgagcttgagagtgagaatgctgaagtcaagaaagcaaggaggttgaagataccaattctgcgagaaggttaccttggagaatgcattagaaaaaacagagtgcttccatttgatttgtataaagtagaagctgcattggaatcttcgaaaggaggcacaatgactgttaaagttaaagggcgaagtgctgttcatgagtcctctggtttgcaagatacaggtcatattcttgaagatggaaaaagcatatacaatacaaccctgaacatgtctgacctgacacgaggtgtgaacagctattatatacttcaggtcattgaagaggataatgggtctgattgttatgtattccgaaagtggggacgagttgggaatgaaaaaattggaggcactaagttggaggagatgtcgaaaattcatgctattcaggaatttagaagattgtttcttgagaagactggaaacccctgggaagcatgggaacaaaaaacaaatttccaaaagcagcctgggaaattttatccacttgacattgactatggtgtaaggcaaggaccaaagcggaaagacattgacaaaatgaaaagttcacttcctccccagttgctggagctcatgaatatgcttttcaatattgaaacatacagggctgctatgctggaattcaaaattaacatgtctgagatgcccctgggtaaactaagcaaggaaaatatccaaaaaggttttgaagcattaactgagatacagaatctattgggtaacactaataatcaagaactggcggttagagagagcttgatcgttgccgcgagcaatcgtttcttcacccttattccttctattcatcctcacattatacaagatgaggatgatttgatggtgaaagtgaaaatgcttgaagctctgcaagatattgaaattgcttctaaacttgttggcttcgatagtgacaatgatgagtctcttgatgacaagtacaagaaacttcgatgtgccattacgccactccctcatgattgtgaagattacaagctagttgagaagtatcttcttaacactcatgctcctacccacaaggagtggtcactggaattagaggaagtcttttcgcttgatcgagatggagaattcagcaagtactcaagatataagaataatctacataacaagatgttgttatggcatggttcaaggttgaccaattatgttggaatacttagtcaaggactaagaatagcacctcctgaggctcccgtgacaggctatatgtttgggaaaggcctctactttgcagatttagtaagcaagagtgcacaatattgttacgtggataggaagaatccagttggtttgatgcttctttccgaggttgctctaggtgacatgtatgaactgaagaaagccacgtccatggacaaacctccaagagggaaacactcgaccaagggcttaggcaaaaccgtgccgctcgagtctgagtttgcgaaatggagggatgatgttgtggtgccatgcggaaagccagtgccagcatctatcaagacatctgagcttatgtacaatgagtatattgtctacaatacatcccaggtgaagatgcagtacttgttgaaggttaggttccatcacaagaggtgactagaagacttgaggtaggagtagaaatgtagaattaatcagtggaagtatctccatcgttatcagtagtctgtggtggctacgcttttgatgtgttagaatgatttatccagtagtttcaggttggtaggaggttatgtgctgctcgcgtatgatccgttttggggtatgttgcatgggcatcgcgcgagtggcgcaagtaaatcccctgcgcatgccatgggcatttgatagatgtttgcctaattttctgtggcaatgtgcgcatttggcatctctgtttagcttgctattttatcatcactcgcgttatttgtgcgttgttgcgttttggcta

SEQ ID NO: 154 - protein, 977 aa, Oryza sativa
MAAPPKAWKAEYAKSGRSSCKSCRSPIGKDQLRLGKMVQATQFDGLMPMWNHASCILSKKNQIKSVDDVEGIDTLRWDDQEKIRNYVGSAPATASSAAAISDKCTIEVAKSARTSCRRCGEKIKKGTVRVSSKLEGQGWYHASCFLEMSPAATVENFSGWEILSHEDKRAVLDLVKKDAPSSGQTSSKGSKRKNNQNDIHDCKAPKIIRSISEGTAEDKGKAVVSHDSNANSSDLQEKLKEQSDTLWKLKDELKKHVSTAELRNMLEANGQDTSGPERHLLDRCADGMLFGALGTCPVCSSFLYYHGGQYHCSGYVSEWSKCTYSTTEPVRSKKKWKIPDEMDNGYLTKWFKSQKAKKPERVLPPMSPEKSLCQSTQQNRSFLSEGLDKLRVSIVGQSKDVVDGWKQKLKDAGANFNATVTKDSSCLVLCSELESENAEVKKARRLKIPILREGYLGECIRKNRVLPFDLYKVEAALESSKGGTMTVKVKGRSAVHESSGLQDTGHILEDGKSIYNTTLNMSDLTRGVNSYYILQVIEEDNGSDCYVFRKWGRVGNEKIGGTKLEEMSKIHAIQEFRRLFLEKTGNPWEAWEQKTNFQKQPGKFYPLDIDYGVRQGPKRKDIDKMKSSLPPQLLELMNMLFNIETYRAAMLEFKINMSEMPLGKLSKENIQKGFEALTEIQNLLGNTNNQELAVRESLIVAASNRFFTLIPSIHPHIIQDEDDLMVKVKMLEALQDIEIASKLVGFDSDNDESLDDKYKKLRCAITPLPHDCEDYKLVEKYLLNTHAPTHKEWSLELEEVFSLDRDGEFSKYSRYKNNLHNKMLLWHGSRLTNYVGILSQGLRIAPPEAPVTGYMFGKGLYFADLVSKSAQYCYVDRKNPVGLMLLSEVALGDMYELKKATSMDKPPRGKHSTKGLGKTVPLESEFAKWRDDVVVPCGKPVPASIKTSELMYNEYIVYNTSQVKMQYLLKVRFHHKR

SEQ ID NO: 155 - DNA, 3364 bp, Glycine max
taggaaaaaaacaaaagatgtgagagtaaaaggagggaagagtgggagcaacgggtgagtgaaaagtgtgagaaaatgtctaaccctcaagaccagaaaccatggaaagcggaatacgcgaagtctgggagatcttcatgcaggacgtgcaagagccccattgccagcgaaacgctgcgtctcgggaagatggttcaatccaccaaattcgatggcctcgtgcccatgtggaaccatgctgcttgcgtattgaagaaagccaatcagataaaattagttgaagatgttgaaaacttagagtcacttcgttgggaagatcagcagaagatcagaaaatacatagagagtggcggcggtggcggcagcagcagtggcgggggcagcgcggcaaagtcagactccaagactgtcaaagatactaaatgtggtattgaagtttcacaaaattctcgtgccacatgcaaggattgcggtcaaaaaattatcaaaggagaggttcgtatatctactaagcaaggtggtcaaggtgctaaaggtttggcttggcaccatgccaagtgtctcatcgatctgtcaccatcaattgaagtggataagttatctggatggaacaatctctcatcttctgatcaatcagctgtcattgacttcgctaaaaagggtggtagtgatacaaaaattgagactgaggagggtaaagaatccacaccacaacaaacttccaaaggtggcataaaacgggggaaggatgttgatagtgagcggaaatcaaaagttgctaaggccaagggagatgtgtctgtgggcagcgcaatgtcagtgaaatcaggggaagcatgtgatctggagaagaaaatggagacccaaagcaaagaactctgggatttgaaggacgatctcaaaaagcacgttacaacaacagagttgcgtgaaatgttggaagccagtggtcaagattcaacaggatcagaacttgatttacgtgaccgctgtgctgatggaatgatgtttggagcacttgatctttgcccaatatgttctggctttctgcgttactctggaggaatgtaccggtgccatggatacatttccgagtggagtaaatgttcttactctacctgtgaaccaaaacgtattgaagggaagtggaaaatcccaaaagaaacaaataatcagtaccttaaaaagtggttcaaatctcaaaaagggaagaaaccagttaggatattgcctcttccatcaccaaggaaatctgctgaaagtcaaatgattgctagtcagcatcaatcatcaaatagtggaaatttacgagatttgaaagttgctatctgtggattacctaatgactctattgcggaatggaaatgcaaaattgatggcatatgtgggatgtttcatgcaaaagtaaataaagatactaactgcttggtggttggtggatcactcaattatgaagctgagatgcggaaggcaaggaggatgaaaataccaatagtcagagaggactatttgattgactgcttagcaagaaagaaaaggcttccatttgatatgtacaaggttgaaatgattggtgaggcttctagcatggtcaccattaaagtgaagggacatagtgctgttcacgaggcttctggcctacaggattccggccacatacttgaggaagggaaaagcatatataacacaactttgaatatgtctgatttgtctactggtattaacagctactacattctccagataatccaagaagataaggggtcagattgctatgtgtttcgtaaatggggccgagttggaaatgacaagattggaggaacaaagctggaggaaatgtcaaaatctgatgcagtatgtgaattcaaacgattattctatgagaagactggaaacccttgggacgcatgggaacaaaagactatccagaagcaacctggaagatttttcccattggatattgactatggagttaacaaacaggtctcaaaaaaggaaaaaaatgatgtcgacagcaaactacctcctccattaatagaattgatgaagatgctctttaatgtggaaacatacagagctgccatgatggaatttgagatcaatatgtctgaaatgccacttgggaaattgagcaaaagcaacatccaaaaggggtttgaagcattgacagagatacaaaatctgttaaaaattagcaatcccgatccatcagtcaaggaaagcttacttattaatgccagcaatcggttcttcaccatgatcccttctgttcatccacatattattagggatgaggatgactttaagtccaaggtgaaaatgttagaagcccttcaagacattgaaattgcctcaagattagttggatttgatgccaacaatgatgattccattgatgataattataagaagcttcactgtgatatatctccacttcctcatgatagtgaagagttttgtttaattgagaagtttctccataatactcatgcccccacacatacggactggagtcttgagctagaagaagttttttcacttgaaagggaaggtgaatttgataagtttgctccttacagggataaacttggaaacagaatgctcctatggcatggttctaggttgacaaactttgtgggcattcttagccaaggactcagaattgcacctcctgaagcccccgcgactggctatatgtttggcaaaggggtttactttgctgacctggtcagcaaaagtgctcagtattgcttcactgataagaaaaatcctgttggtctaatgcttttgagtgaagttgcacttggaaatgtctatgagctcaagaaagcgaagtatatggataaacctcctgaaggaaagcactctactaaaggactgggcaagaaaatgcctcaggaatcagaatatgtaaagtggaggggcaatgtcactgttccttgtggcaaaccagttccatcaaatgtcaagagttctgagctcatgtacaatgagtatattgtttataatactgctcaagttaagatgcaattcttgttgaaggtgaggtttcatcacaagagatgaggactggtgagaagtttgctgttctggggtatcatctatactaagctgttttttgaccatgacttgtacgtagtccatctgggacatctgggattttctagaattgtctttggtaaggtctcattttgagttgataggagatctttctacgtttttttttaggacatgtaagtccaggaatctatctagttgaaactcgccacttagaacagaaatatcccatgcaatttgtgatctggttatctgtatagaactattattttaatctcaaactttttattgagctcttccattttta

SEQ ID NO: 156 - protein, 996 aa, Glycine max
MSNPQDQKPWKAEYAKSGRSSCRTCKSPIASETLRLGKMVQSTKFDGLVPMWNHAACVLKKANQIKLVEDVENLESLRWEDQQKIRKYIESGGGGGSSSGGGSAAKSDSKTVKDTKCGIEVSQNSRATCKDCGQKIIKGEVRISTKQGGQGAKGLAWHHAKCLIDLSPSIEVDKLSGWNNLSSSDQSAVIDFAKKGGSDTKIETEEGKESTPQQTSKGGIKRGKDVDSERKSKVAKAKGDVSVGSAMSVKSGEACDLEKKMETQSKELWDLKDDLKKHVTTTELREMLEASGQDSTGSELDLRDRCADGMMFGALDLCPICSGFLRYSGGMYRCHGYISEWSKCSYSTCEPKRIEGKWKIPKETNNQYLKKWFKSQKGKKPVRILPLPSPRKSAESQMIASQHQSSNSGNLRDLKVAICGLPNDSIAEWKCKIDGICGMFHAKVNKDTNCLVVGGSLNYEAEMRKARRMKIPIVREDYLIDCLARKKRLPFDMYKVEMIGEASSMVTIKVKGHSAVHEASGLQDSGHILEEGKSIYNTTLNMSDLSTGINSYYILQIIQEDKGSDCYVFRKWGRVGNDKIGGTKLEEMSKSDAVCEFKRLFYEKTGNPWDAWEQKTIQKQPGRFFPLDIDYGVNKQVSKKEKNDVDSKLPPPLIELMKMLFNVETYRAAMMEFEINMSEMPLGKLSKSNIQKGFEALTEIQNLLKISNPDPSVKESLLINASNRFFTMIPSVHPHIIRDEDDFKSKVKMLEALQDIEIASRLVGFDANNDDSIDDNYKKLHCDISPLPHDSEEFCLIEKFLHNTHAPTHTDWSLELEEVFSLEREGEFDKFAPYRDKLGNRMLLWHGSRLTNFVGILSQGLRIAPPEAPATGYMFGKGVYFADLVSKSAQYCFTDKKNPVGLMLLSEVALGNVYELKKAKYMDKPPEGKHSTKGLGKKMPQESEYVKWRGNVTVPCGKPVPSNVKSSELMYNEYIVYNTAQVKMQFLLKVRFHHKR

SEQ ID NO: 157 - DNA, 3490 bp, Solanum tuberosum
caaaaaaaaacaagaaagagggttttggggttcaaatagagcccattaggtccacagtcgaatagagcaatgccacaagcttctcagacaagcttaaagattcaagagattcccctttcgtcactccggtgagtgtgacgccactcttatttccccatacataatctgcattaacagcgacacacagagagagctaagcaggaacgaatatacaaacacccgaaagagcaaattgttgcggaaatggcgaatcctccgaagccatggaaagctgagtatgcaaaatcatcgcgttcagcatgcaaaacttgcaaaagtattattgacaaagaagttttcagaattggaaaaatggtccaatccactcattttgatggattaatgccgatgtggcatcatgctaactgcatcttgaggaaagcaaaacagataaaatcccttgaagatgttgaaggggttgaccagttgcggtgggaggatcagcagaagataagggaatatgtacaggttggtggatcctcaaacatccctactccggctgcagtggaatgtggtattgaagtatctccagcctcccgtgcttcctgtcggcactgcaaccaaaagattgttaaaggggaggtacgcatatcatcaaaacctgaaggtcaacgtgctaagtcgctggcatggcatcatgcaaagtgtttctctgaaatatcttcgactatccaggttgaaaagctatctaattgggatagcctctcggctgctgatcaggcagctgtgctatccctgtttaagagttctacattgacaggtaacaaaactgatcccaaggaggaactagcacaagaatcaacatctaaggctggtgctaaaaggaaaaaacccagtaacaacagtgagaaatcaaagcttgctaaagctgaagctgatgtttctaccggcaaaaaagtggttgacagaaacattgacaacgtgaaggatgaactctctaaagcatctgagctggagagccaactggaggcacagactaaagccctatgggcactcaaggatgatctcaaaaagcatgtcagtacaggagagttgcgagagatgcttgaagctaatgatcaggaatcttcaggatcagagcttgatcttcgagatcgctgtgccgatgcgatgcattttggagcactccccaaatgtcccctttgttcaggacaccttcgatattctggaggcatgtatagatgtcatggctatttgtcagaatggagcaagtgttcatactctgtcactgacataaaacgtgataaaggaaaatggaaaattcctgaaaaaaccagcaacgagtttcttctcaagtggtataagggacaaaagtcaaaaaaaccagaaaggatactgcttccggctacacccagcaaggaatctgtgagccaggctgctaatgggctgtctcagtcttccaagggtgaaaacctagaggatctaaaagttgctttgattggattgtccatagattccagagagaactggaagagcaaaattgaggaagctggtggacgggtgcatgccaagttgaagaaagacacagattgcttagttgtaatagggacgtggaatgatcaagattctgagataaagaaggccaggagactgaaagtgccagtagtcagggaggattatttggtggatagtatcaacagaaagaaaaaacttccttttggcttgtataaattagaagctaatggtgagactcaaagcatgaaaactgtcaaagtaaaagggaggagtgcggttcatgagtcatccaaattggaagatacaggacacattcttgaggacaagaccagcatttataatacgactttaaatatgtcagacctctcaagtggcattaatagttactacatccttcaaattattgaagaggacaaagggtcagactgttatgtttttcgcaaatggggtcgcgttggaaatgagaaaattggaggaaacaagttagaggagatgtctaaatcagatgcaatacaacattttaagcgtttgtttcttgagaagactgggaactcatgggaagcatgggaacaaaagaaaaattttcagaagcaacctggcagattttatcctctggatattgattatggggttgacaaaaaacccacctctaagagtaatatcaatgacacaaacagcaaacttgcccctccattgatggagctgatgaagattctctttaatgttgagacatacagggctgctatgatggaatttgagataaatatgtcggagatgccactaggaaagctgagtaaaaggaatatccaaaaaggttttgaggcattaacggagatacaaaatctgttcagcagcactaatcatgatccaactgtcaaggagacccttcttgttgatgcaagcaatcgctttttcacagtcataccatctattcatcctcatgttattaaagatgaggatgattttaagttgaagataaaaatgctggaagctcttcaggacattgaaatagcttcacgacttgttggctttgacattgacaatgatgactcgctggatgagaagtataagaagctacagtgtgatatatctccacttcctcatcaaagtgaagattatcgagttattgaaaagtatctccaaaatactcatgctcctacacataaggactgggttctagaagttgaagacgtgttctctctcgaacgtaaaggggaatttgacaagtttaaaccttgcaaagagaaactgaagaacagaatgcttctatggcatggttcacgtttgacaaactttgtgggtattcttagccaaggactaagaattgctcctccagaagcccctgctacggggtacatgtttggaaagggaatatactttgctgatatggtcagtaaaagtgcacaatattgcttcactgatcacaagaatcctgttgggtttatgcttctcagtgaagttgctttaggtgaggtttatgagctaaaggcagccaagtacatggacaaacctcctaaagggaagcactctactaagggtcttggcaagacagtacctgagagatcagattttgtgaactggagggatgaagttgtggttccgtgtggaaaaccagtaacatcaaatgttaagaactctgagcttctgtacaatgaatacatagtgtacgacgctgctcaagtaaagctgcaattcttagtcaaagtgaggtttaatttcaagcggtgaagttatgattcagacttgtaaatacgtgtgttttgtaaaaaaatagtttcactccatatcagtgaaaactgcactttcttacccatcatgtgcaggcttgacattgtcttttgttgtgtatggggagggctagatctcattttggggtttttaggaggagatcgcttcctgcacatgtaaatgcctctttgtaagagatgaaatcatgtttctatttttcgactatgatgcttagctttctggtaaagattaacattagcagtattaa

SEQ ID NO: 158 - protein, 992 aa, Solanum tuberosum
MANPPKPWKAEYAKSSRSACKTCKSIIDKEVFRIGKMVQSTHFDGLMPMWHHANCILRKAKQIKSLEDVEGVDQLRWEDQQKIREYVQVGGSSNIPTPAAVECGIEVSPASRASCRHCNQKIVKGEVRISSKPEGQRAKSLAWHHAKCFSEISSTIQVEKLSNWDSLSAADQAAVLSLFKSSTLTGNKTDPKEELAQESTSKAGAKRKKPSNNSEKSKLAKAEADVSTGKKVVDRNIDNVKDELSKASELESQLEAQTKALWALKDDLKKHVSTGELREMLEANDQESSGSELDLRDRCADAMHFGALPKCPLCSGHLRYSGGMYRCHGYLSEWSKCSYSVTDIKRDKGKWKIPEKTSNEFLLKWYKGQKSKKPERILLPATPSKESVSQAANGLSQSSKGENLEDLKVALIGLSIDSRENWKSKIEEAGGRVHAKLKKDTDCLVVIGTWNDQDSEIKKARRLKVPVVREDYLVDSINRKKKLPFGLYKLEANGETQSMKTVKVKGRSAVHESSKLEDTGHILEDKTSIYNTTLNMSDLSSGINSYYILQIIEEDKGSDCYVFRKWGRVGNEKIGGNKLEEMSKSDAIQHFKRLFLEKTGNSWEAWEQKKNFQKQPGRFYPLDIDYGVDKKPTSKSNINDTNSKLAPPLMELMKILFNVETYRAAMMEFEINMSEMPLGKLSKRNIQKGFEALTEIQNLFSSTNHDPTVKETLLVDASNRFFTVIPSIHPHVIKDEDDFKLKIKMLEALQDIEIASRLVGFDIDNDDSLDEKYKKLQCDISPLPHQSEDYRVIEKYLQNTHAPTHKDWVLEVEDVFSLERKGEFDKFKPCKEKLKNRMLLWHGSRLTNFVGILSQGLRIAPPEAPATGYMFGKGIYFADMVSKSAQYCFTDHKNPVGFMLLSEVALGEVYELKAAKYMDKPPKGKHSTKGLGKTVPERSDFVNWRDEVVVPCGKPVTSNVKNSELLYNEYIVYDAAQVKLQFLVKVRFNFKR

SEQ ID NO: 159 - DNA, 3488 bp, Solanum lycopersicum
ccattaggtccacagtcgaatagaacaatgccacaagcttctcagacaagcttaaagattcaagaaattccccttgcgtcactccggcgagtgtgacaccactcttgattccaccatatataatctgcatcaacagcgacacatagagagagccaagcaggaacgaacatacaaacacccaaaagagcaaattgtagcggaaatggcgaatcctccgaagccatggaaagctgagtatgcaaaatcatctcgttcagcatgcaaaacttgcaaaagtattattgacaaagaagttttcagaattggaaaaatggtccaatctactcattttgatggattaatgccgatgtggcatcatgctaactgcatcttgaggaaagcaaaacagataaaatcccttgaagatgttgaaggggttgaccagttgcggtgggaggatcagcagaagataagggaatatgtacagactggtggatcctcaaacatccctcctccggctgcagtggaatgtggtattgaagtatctccagcctcgcgtgcttcctgtcggcactgcaaccaaaagattgttaaaggggaggtacgcatatcatcaaaacctgaaggtcaacgtgctaagtcgctggcatggcatcatgcaaagtgtttctctgaaatatcttcgactacccaggttgaaaatctatctaattgggatagcctctcagctgctgatcaggcagctgttctatccctgtttaagagttctacattgacgggtaacaaaactgatcccaaggaggaactagcacaggaatcaacatctaaggctggtgctaaaaggaaaaaaaccagtaacaacagtgagaaatctaaggttgctaaagccgaacttgatgtttctaccggcaaaaaagtggttgacagaaacattgacaatgtgaaggttgaactctccaaaggatctgagctggagagccaactggaggcacagactaaagccctatgggcactcaaggatgatctcaaaaagcatgtcagcacaggagagttgcgagagatgcttgaagctaatgatcaggaatcttcaggatcagagcttgatcttcgagatcgctgtgctgatgcaatgcattttggagggctccccaaatgtcccctttgttcaggacaccttcgatattctggaggcatgtacagatgccatggctatttgtcagaatggagcaagtgttcatactctgtcaccgacataaaacgtgataaaggaaaatggaaaattcctgaaaaaaccagcaacgagtttcttctcaagtggtataagggacaaaagtcaaaaaaaccagaaaggatactgcttccggctacactcagcaaggaaactgtgagccaggctggtaatgggctgtctcagtcttccaagggtgaaaacctaggggatctaaaagttgctttgacaggattgtccagagattccagggagaactggaagagcaaaattgaggaagcaggtggacaggtgcatgccaagctgaagaaagaagtatttggacttgcagacacagattgcttagttgtaatagggacgtggaatgatcaagattctgagataaagaaggccaggagactgaaagtgtcagtagtcagggaggattatttggtggatagtatcaacagaaagaaaaaacttccttttgacttgtataaattagaagctaatagtgagactcaaagcatgaaaactgtcaaagtaaaagggaggagtgcggttcatgagtcatccagattgcaagatacaggacacattcttgaggaaaagaccagcatttataatacgactttaaacatgtcagacctctcaagtggtattaatagttactacatccttcaaattattgaagaggacaaagggtcagactgttatgtttttcgcaaatggggtcgtgttggaaatgagaaaattggaggagacaagttagaggagatgtctaaatcagatgcaatacaacattttaagcgtttgtttcttgagaagactgggaattcatgggaagcatgggaacaaaagaaagatttccagaagcaacctggcagattttatcctctggatattgattatggggttgacaaaaaaaccacctccaagagaaatttcaatgacacaaattgcaaacttgcccctccattgatggagctgatgaagattctatttaatgttgagacatacagggctgctatgatggaatttgagataaatatgtcggagatgccactgggaaagctgagtaaaaggaatatccaaaaaggttttgaggcattaacggagatacaaaatttgttaagcggcactaatcatgatccaactgtcaaggagacccttcttgttgatgcaagcaatcgctttttcacagtcataccatctattcatcctcatgttattaaagatgaggatgattttaagttgaagataaaaatgctggaagctcttcaggacattgaaatagcttcacgacttgttggctttgacattgacaatgatgactcgctggatgagaagtataagaagctacagtgtgatatatctccacttcctcatcaaagtgaagattatcgagttattgaaaagtatctccaaaatactcatgctcctacacataaggagtgggttctagaagtggaagaagtgttttctctcgaacgtaaaggggaatatgacaagtttaaaccctgcagagataaactgaagaacaaaatgcttctatggcatggttcacgtttgacaaactttgtgggtatacttagccaaggactaagaattgctcctccagaagcccctgctacggggtacatgtttggaaagggaatatactttgctgatatggtcagcaaaagtgcacaatattgcttcactgatcgcaagaaccctgttggatttatgcttctcagtgaagtagctttaggtgaggtttatgagctaaaggcagccaagtatatggacaaaccacctaaaggcaagcactctactaagggtctgggcaagacagtacctgagagatcagagtttgtgaactggagggatgaagttgtggttccgtgtggaaaaccagtaacatcaaatgttaagaactctgagcttctgtacaatgaatacatagtctacgaagctgcccaagtaaagctgcagttcttagtcaaagtgaggtttaatttcaagcggtgaagtaatgattcagacttgtaaatatgtgtgttttgtaaagatagtttcactccttatcagtgaaaactgctctttcttacccattgaggttatcttttgttgtgtatggggagggctagatctcattttgggggttttaggaggagatcgcttcctgaacatgtaaattcctctttgtaagagatgaaatcatgtttctacttttcgactatgatgcttagatttctggtaaagattaacattagcagtattaacttgagagcaaatgtcctcgacattgctttgcgtc

SEQ ID NO: 160 - protein, 998 aa, Solanum lycopersicum
MANPPKPWKAEYAKSSRSACKTCKSIIDKEVFRIGKMVQSTHFDGLMPMWHHANCILRKAKQIKSLEDVEGVDQLRWEDQQKIREYVQTGGSSNIPPPAAVECGIEVSPASRASCRHCNQKIVKGEVRISSKPEGQRAKSLAWHHAKCFSEISSTTQVENLSNWDSLSAADQAAVLSLFKSSTLTGNKTDPKEELAQESTSKAGAKRKKTSNNSEKSKVAKAELDVSTGKKVVDRNIDNVKVELSKGSELESQLEAQTKALWALKDDLKKHVSTGELREMLEANDQESSGSELDLRDRCADAMHFGGLPKCPLCSGHLRYSGGMYRCHGYLSEWSKCSYSVTDIKRDKGKWKIPEKTSNEFLLKWYKGQKSKKPERILLPATLSKETVSQAGNGLSQSSKGENLGDLKVALTGLSRDSRENWKSKIEEAGGQVHAKLKKEVFGLADTDCLVVIGTWNDQDSEIKKARRLKVSVVREDYLVDSINRKKKLPFDLYKLEANSETQSMKTVKVKGRSAVHESSRLQDTGHILEEKTSIYNTTLNMSDLSSGINSYYILQIIEEDKGSDCYVFRKWGRVGNEKIGGDKLEEMSKSDAIQHFKRLFLEKTGNSWEAWEQKKDFQKQPGRFYPLDIDYGVDKKTTSKRNFNDTNCKLAPPLMELMKILFNVETYRAAMMEFEINMSEMPLGKLSKRNIQKGFEALTEIQNLLSGTNHDPTVKETLLVDASNRFFTVIPSIHPHVIKDEDDFKLKIKMLEALQDIEIASRLVGFDIDNDDSLDEKYKKLQCDISPLPHQSEDYRVIEKYLQNTHAPTHKEWVLEVEEVFSLERKGEYDKFKPCRDKLKNKMLLWHGSRLTNFVGILSQGLRIAPPEAPATGYMFGKGIYFADMVSKSAQYCFTDRKNPVGFMLLSEVALGEVYELKAAKYMDKPPKGKHSTKGLGKTVPERSEFVNWRDEVVVPCGKPVTSNVKNSELLYNEYIVYEAAQVKLQFLVKVRFNFKR

SEQ ID NO: 161 - DNA, 3472 bp, Sorghum bicolor
ttcctgttgacacctcagaagtcagaacccacctccgtcttccttggtccggcctccgactccaccgaaggggctgagagaagaggggaaccgcaccgcagctggccggcggaatggcggcgccgccgagggcgtggaaggcggagtacgccaagtccgggcgggcgtcgtgcaagtcgtgcaagtcccccatcgccaaggaccagctccgtctcggcaagatggttcaggcgtcacagttcgacggcttcatgcccatgtggaaccatgctaggtgcatcttcagtaagaagaaccagataaaatccgtcgatgatgttgaaggaatagatgcacttagatgggatgatcaagagaagataagaaactacattgggagtgcctcagctgctacaagttccacagctgctgctcctgataaatgtactattgagattgctccatctgcccgtacttcatgtagacgatgcagtgaaaagattgcaaaaggatcagtccgtctgtcagctaagcttgagagtcaaggttccaagggtataccatggtatcatgctaactgtttctttgaggtatccccatctgcaactgttgagaagttctcaggctgggatactctgtcagatgaggataagagaaccgtgcttgatcttgttaaaaaagatgtcggtgacaatgaacaaactaagggttccaagcgcaagaagggcgaaaatgatatggatagctgcaaagccgctaggttagatgaaagtacatctgaaggtacagtgcgaaacaaagggaaacttgtggacccatgtgattccaatactagttcagctgatacccaacaaaagcttaaagtgcaaagtgacacactttggaagttaaaggatgaacttaagagccatgtatcggctgctgaattaagggatatgcttgaggctaatgggcaggatatatctggaccagagaggcacctattggaccgctgtgctgatggaatgctatttggagcattgggtccttgcccagtctgtgctagtggcctgtactattataatggtcagtaccaatgcagtggtaatgtgtcagagtggtccaagtgtacatactctaccacagaacctgtccgcattaagaagtggcaagttccagatggaacaaagaatgattaccttatgaagtggttcaagtctcaaaaggttaagaaaccagagagggttcttccaccaatgtcacctgagaaatccggaagtaaagcaactcagagaacgtcatcgctgtcttctaaagggttggacaaattaaggttttctgttgtaggacaatcaaaagaagtggccaatgaatggatcgagaagctcaaacttgctggtgccaacttctatgccagggttgtcaaagatattgattgtttaatttcatgtggtgagctcgacaatgagaatgctgaagtcaggaaagcaaggaggctgaagataccaattgtaagggagggttacattggagaatgcattaaaaagaatagaatgcttccatttgatttgtataaactagagaataccatagagtcctcaaaaggtggtactgtcactgttaaagttaagggtcgaagtgctgttcatgagtcctccggtttgcaagatactgctcatattcttgaagatgggaagagcatttacaatacaaccctaaacatgtctgacctggcactaggtgtgaacagctactatatactccagatcattgaagaggatgatgggtctgagtgctatgtatttcgaaagtggggacgggttgggaatgaaaaaattggagggaaaaagctggaggagatgtcaaaaactgatgcaatcaaggaattcaaaagattatttctggagaagactggaaacccatgggaagcttgggaacgtaaaaccaatttccggaagcagcctgggagattttacccacttgatattgattatggtgttaagcaagcaccaaaacggaaagatatcagtgaaatgaaaagttctcttgctcctcagttgctagaactcatgaagatgcttttcaacgtggagacatatagagctgctatgatggaatttgaaattaatatgtcagaaatgcctcttgggaagctaagcaaggaaaatattcagaaaggctttgaagcattaactgagatacagaatttattgaaggacaccgcggatcaagcactggctgttagagaaagcttaattgttgctgcgagcaatcgctttttcactcttattccttctattcatcctcatattatacgggatgaggatgatttgatgatcaaagcaaaaatgcttgaagctctgcaggatattgaaattgcttcaaagctagttggcttcgatagcgacaatgatgaatctcttgatgataaatatatgaaacttcactgtaacatcaccccgctggatcacgatagtgaagattacaagctaattgagcagtatctcctcaacacacatgctcctactcacaaggactggtcgctggaactggaggaagttttttcactcgatcgagatggagaacttaataaatactcaagatataaaaataatctgcataacaagatgctattatggcatggttcaaggttgacgaattttgtgggaattcttagtcaagggctaagaattgcacctcctgaggcacctgtttcaggctatatgtttggcaaaggcctctactttgcagatttagtaagcaagagcgcacagtattgtaatgtggacaggaataatcctgtaggtttgatgattctttctgaggttgctttaggagacatgaatgaactaaagaaagccacgtacatggacaaacctccaagagggaagcattcgaccaaaggtttaggcaaaactgtgccactggagtcagagtttgtgaagtggagggatgatgtcgtcgttccctgtggcaagccagtgccatcatcaattaggagctctgaactcatgtacaatgagtacatcgtctacaacacatcccaggtaaagatgcagttcttgctgaaggtgcgtttccatcacaagaggtgactgggagactaggcaagtagagttggaagctagagaggtagagtttgttgatgcgtctcttttggtactattagtcagtctggcctgtatatccggtccacggtcctgttagcctgtagtttgggtaggttattatggggtgctcgcgcttgatccattttgggaagtgttgcttgggcatcagtgcgagtagcacaaatcatccacttttacaagatgacgtgttactgcatgaatctactaggagtaatatgttagctggacctgctatcttcacttgtgatgactgctttcgatgggacttaggagtatttttggtcgaagaagtggaaggtggcttgtcgtctgaacttaacttctgtattcccgagctggacgttacaagcgtgtgttgaaggtcatttgcaaaatcaaagcaa

SEQ ID NO: 162 - protein, 979 aa, Sorghum bicolor
MAAPPRAWKAEYAKSGRASCKSCKSPIAKDQLRLGKMVQASQFDGFMPMWNHARCIFSKKNQIKSVDDVEGIDALRWDDQEKIRNYIGSASAATSSTAAAPDKCTIEIAPSARTSCRRCSEKIAKGSVRLSAKLESQGSKGIPWYHANCFFEVSPSATVEKFSGWDTLSDEDKRTVLDLVKKDVGDNEQTKGSKRKKGENDMDSCKAARLDESTSEGTVRNKGKLVDPCDSNTSSADTQQKLKVQSDTLWKLKDELKSHVSAAELRDMLEANGQDISGPERHLLDRCADGMLFGALGPCPVCASGLYYYNGQYQCSGNVSEWSKCTYSTTEPVRIKKWQVPDGTKNDYLMKWFKSQKVKKPERVLPPMSPEKSGSKATQRTSSLSSKGLDKLRFSVVGQSKEVANEWIEKLKLAGANFYARVVKDIDCLISCGELDNENAEVRKARRLKIPIVREGYIGECIKKNRMLPFDLYKLENTIESSKGGTVTVKVKGRSAVHESSGLQDTAHILEDGKSIYNTTLNMSDLALGVNSYYILQIIEEDDGSECYVFRKWGRVGNEKIGGKKLEEMSKTDAIKEFKRLFLEKTGNPWEAWERKTNFRKQPGRFYPLDIDYGVKQAPKRKDISEMKSSLAPQLLELMKMLFNVETYRAAMMEFEINMSEMPLGKLSKENIQKGFEALTEIQNLLKDTADQALAVRESLIVAASNRFFTLIPSIHPHIIRDEDDLMIKAKMLEALQDIEIASKLVGFDSDNDESLDDKYMKLHCNITPLDHDSEDYKLIEQYLLNTHAPTHKDWSLELEEVFSLDRDGELNKYSRYKNNLHNKMLLWHGSRLTNFVGILSQGLRIAPPEAPVSGYMFGKGLYFADLVSKSAQYCNVDRNNPVGLMILSEVALGDMNELKKATYMDKPPRGKHSTKGLGKTVPLESEFVKWRDDVVVPCGKPVPSSIRSSELMYNEYIVYNTSQVKMQFLLKVRFHHKR

SEQ ID NO: 163 - DNA, 1621 bp, Artificial Sequence
  DNA fragment (ZmUbi) flanked by homology arms
gcatttattttagaaatgataggatatatttaaggcgacatatggaagtgagcggctggcggctgttcaagaagatatcgcggtcgtgcccctctctagagataatgagcattgcatgtctaagttataaaaaattaccacatattttttttgtcacacttgtttgaagtgcagtttatctatctttatacatatatttaaactttactctacgaataatataatctatagtactacaataatatcagtgttttagagaatcatataaatgaacagttagacatggtctaaaggacaattgagtattttgacaacaggactctacagttttatctttttagtgtgcatgtgttctcctttttttttgcaaatagcttcacctatataatacttcatccattttattagtacatccatttagggtttagggttaatggtttttatagactaatttttttagtacatctattttattctattttagcctctaaattaagaaaactaaaactctattttagtttttttatttaataatttagatataaaatagaataaaataaagtgactaaaaattaaacaaataccctttaagaaattaaaaaaactaaggaaacatttttcttgtttcgagtagataatgccagcctgttaaacgccgtcgatcgacgagtctaacggacaccaaccagcgaaccagcagcgtcgcgtcgggccaagcgaagcagacggcacggcatctctgtcgctgcctctggacccctctcgagagttccgctccaccgttggacttgctccgctgtcggcatccagaaattgcgtggcggagcggcagacgtgagccggcacggcaggcggcctcctcctcctctcacggcaccggcagctacgggggattcctttcccaccgctccttcgctttcccttcctcgcccgccgtaataaatagacaccccctccacaccctctttccccaacctcgtgttgttcggagcgcacacacacacaaccagatctcccccaaatccacccgtcggcacctccgcttcaaggtacgccgctcgtcctccccccccccccctctctaccttctctagatcggcgttccggtccatggttagggcccggtagttctacttctgttcatgtttgtgttagatccgtgtttgtgttagatccgtgctgctagcgttcgtacacggatgcgacctgtacgtcagacacgttctgattgctaacttgccagtgtttctctttggggaatcctgggatggctctagccgttccgcagacgggatcgatctaggataggtatacatgttgatgtgggttttactgatgcatatacatgatggcatatgcagcatctattcatatgctctaaccttgagtacctatctattataataaacaagtatgttttataattattttgatcttgatatacttggatgatggcatatgcagcagctatatgtggatttttttagccctgccttcatacgctatttatttgcttggtactgtttcttttgtcgatgctcaccctgttgtttggtgttacttctgcagattgggacgacgaagcagccggtcagccggcgctccggccggccggccggcc

SEQ ID NO: 164 - DNA, 1491 bp, Artificial Sequence
  ZmUbi
cggtcgtgcccctctctagagataatgagcattgcatgtctaagttataaaaaattaccacatattttttttgtcacacttgtttgaagtgcagtttatctatctttatacatatatttaaactttactctacgaataatataatctatagtactacaataatatcagtgttttagagaatcatataaatgaacagttagacatggtctaaaggacaattgagtattttgacaacaggactctacagttttatctttttagtgtgcatgtgttctcctttttttttgcaaatagcttcacctatataatacttcatccattttattagtacatccatttagggtttagggttaatggtttttatagactaatttttttagtacatctattttattctattttagcctctaaattaagaaaactaaaactctattttagtttttttatttaataatttagatataaaatagaataaaataaagtgactaaaaattaaacaaataccctttaagaaattaaaaaaactaaggaaacatttttcttgtttcgagtagataatgccagcctgttaaacgccgtcgatcgacgagtctaacggacaccaaccagcgaaccagcagcgtcgcgtcgggccaagcgaagcagacggcacggcatctctgtcgctgcctctggacccctctcgagagttccgctccaccgttggacttgctccgctgtcggcatccagaaattgcgtggcggagcggcagacgtgagccggcacggcaggcggcctcctcctcctctcacggcaccggcagctacgggggattcctttcccaccgctccttcgctttcccttcctcgcccgccgtaataaatagacaccccctccacaccctctttccccaacctcgtgttgttcggagcgcacacacacacaaccagatctcccccaaatccacccgtcggcacctccgcttcaaggtacgccgctcgtcctccccccccccccctctctaccttctctagatcggcgttccggtccatggttagggcccggtagttctacttctgttcatgtttgtgttagatccgtgtttgtgttagatccgtgctgctagcgttcgtacacggatgcgacctgtacgtcagacacgttctgattgctaacttgccagtgtttctctttggggaatcctgggatggctctagccgttccgcagacgggatcgatctaggataggtatacatgttgatgtgggttttactgatgcatatacatgatggcatatgcagcatctattcatatgctctaaccttgagtacctatctattataataaacaagtatgttttataattattttgatcttgatatacttggatgatggcatatgcagcagctatatgtggatttttttagccctgccttcatacgctatttatttgcttggtactgtttcttttgtcgatgctcaccctgttgtttggtgttacttctgcagat

SEQ ID NO: 165 - DNA, 11516 bp, Artificial Sequence
  Vector encoding Mad7 and tDTomato
gggatatcgcggccgcgtcgttcggctgcggcgagcggtatcagctcactcaaaggcggtaatacggttatccacagaatcaggggataacgcaggaaagaacatgtgagcaaaaggccagcaaaaggccaggaaccgtaaaaaggccgcgttgctggcgtttttccataggctccgcccccctgacgagcatcacaaaaatcgacgctcaagtcagaggtggcgaaacccgacaggactataaagataccaggcgtttccccctggaagctccctcgtgcgctctcctgttccgaccctgccgcttaccggatacctgtccgcctttctcccttcgggaagcgtggcgctttctcatagctcacgctgtaggtatctcagttcggtgtaggtcgttcgctccaagctgggctgtgtgcacgaaccccccgttcagcccgaccgctgcgccttatccggtaactatcgtcttgagtccaacccggtaagacacgacttatcgccactggcagcagccactggtaacaggattagcagagcgaggtatgtaggcggtgctacagagttcttgaagtggtggcctaactacggctacactagaaggacagtatttggtatctgcgctctgctgaagccagttaccttcggaaaaagagttggtagctcttgatccggcaaacaaaccaccgctggtagcggtggtttttttgtttgcaagcagcagattacgcgcagaaaaaaaggatctcaagaagatcctttgatcttttctacggggtctgacgctcagtggaacgaaaactcacgttaagggattttggtcatgagattatcaaaaaggatcttcacctagatccttttaaattaaaaatgaagttttaaatcaatctaaagtatatatgagtaaacttggtctgacagttaccaatgcttaatcagtgaggcacctatctcagcgatctgtctatttcgttcatccatagttgcctgactccccgtcgtgtagataactacgatacgggagggcttaccatctggccccagtgctgcaatgataccgcgagacccacgctcaccggctccagatttatcagcaataaaccagccagccggaagggccgagcgcagaagtggtcctgcaactttatccgcctccatccagtctattaattgttgccgggaagctagagtaagtagttcgccagttaatagtttgcgcaacgttgttgccattgctacaggcatcgtggtgtcacgctcgtcgtttggtatggcttcattcagctccggttcccaacgatcaaggcgagttacatgatcccccatgttgtgcaaaaaagcggttagctccttcggtcctccgatcgttgtcagaagtaagttggccgcagtgttatcactcatggttatggcagcactgcataattctcttactgtcatgccatccgtaagatgcttttctgtgactggtgagtactcaaccaagtcattctgagaatagtgtatgcggcgaccgagttgctcttgcccggcgtcaatacgggataataccgcgccacatagcagaactttaaaagtgctcatcattggaaaacgttcttcggggcgaaaactctcaaggatcttaccgctgttgagatccagttcgatgtaacccactcgtgcacccaactgatcttcagcatcttttactttcaccagcgtttctgggtgagcaaaaacaggaaggcaaaatgccgcaaaaaagggaataagggcgacacggaaatgttgaatactcatactcttcctttttcaatattattgaagcatttatcagggttattgtctcatgagcggatacatatttgaatgtatttagaaaaataaacaaataggggttccgcgcacatttccccgaaaagtgccacctgacgcgccctgtagcggcacgtctaattcgggggatctggattttagtactggattttggttttaggaattagaaattttattgatagaagtattttacaaatacaaatacatactaagggtttcttatatgctcaacacatgagcgaaaccctataggaaccctaattcccttatctgggaactactcacacattattatggagaaactcgagcttgtcgatcgacatgatcagggagctctcaggtacctctagacttgtacagctcgtccatgccgtacaggaacaggtggtggcggccctcggagcgctcgtactgttccacgatggtgtagtcctcgttgtgggaggtgatgtccagcttggtgtccacgtagtagtagccgggcagttgcacgggcttcttggccatgtagatggtcttgaactccaccaggtagtggccgccgtccttcagcttcagggcctggtggatctcgcccttcagcacgccgtcgcgggggtacaggcgctcggtggaggcctcccagcccatggtcttcttctgcattacggggccgtcgggggggaagttggtgccgcgcatcttcaccttgtagatcagcgtgccgtcctgcagggaggagtcctgggtcacggtcaccagaccgccgtcctcgaagttcatcacgcgctcccacttgaagccctcggggaaggacagcttcttgtaatcggggatgtcggcggggtgcttcacgtacgccttggagccgtacatgaactggggggacaggatgtcccaggcgaagggcagggggccgcccttggtcaccttcagcttggcggtctgggtgccctcgtaggggcggccctcgccctcgccctcgatctcgaactcgtggccgttcatggagccctccatgcgcaccttgaagcgcatgaactctttgatgacctcctcgcccttgctcaccatggtggcgggatcgcgccctatcgttcgtaaatggtgaaaattttcagaaaattgcttttgctttaaaagaaatgatttaaattgctgcaatagaagtagaatgcttgattgcttgagattcgtttgttttgtatatgttgtgttgagaggatcctctagagtcgacctgcagaagtaacaccaaacaacagggtgagcatcgacaaaagaaacagtaccaagcaaataaatagcgtatgaaggcagggctaaaaaaatccacatatagctgctgcatatgccatcatccaagtatatcaagatcaaaataattataaaacatacttgtttattataatagataggtactcaaggttagagcatatgaatagatgctgcatatgccatcatgtatatgcatcagtaaaacccacatcaacatgtatacctatcctagatcgatatttccatccatcttaaactcgtaactatgaagatgtatgacacacacatacagttccaaaattaataaatacaccaggtagtttgaaacagtattctactccgatctagaacgaatgaacgaccgcccaaccacaccacatcatcacaaccaagcgaacaaaagcatctctgtatatgcatcagtaaaacccgcatcaacatgtatacctatcctagatcgatatttccatccatcatcttcaattcgtaactatgaatatgtatggcacacacatacagatccaaaattaataaatccaccaggtagtttgaaacagaattctactccgatctagaacgaccgcccaaccagaccacatcatcacaaccaagacaaaaaaaagcatgaaaagatgacccgacaaacaagtgcacggcatatattgaaataaaggaaaagggcaaaccaaaccctatgcaacgaaacaaaaaaaatcatgaaatcgatcccgtctgcggaacggctagagccatcccaggattccccaaagagaaacactggcaagttagcaatcagaacgtgtctgacgtacaggtcgcatccgtgtacgaacgctagcagcacggatctaacacaaacacggatctaacacaaacatgaacagaagtagaactaccgggccctaaccatggaccggaacgccgatctagagaaggtagagagggggggggaggacgagcggcgtaccttgaagcggaggtgccgacgggtggatttgggggagatccactagttctagagcggccgccaccgcggtggaattctcgaggtcctctccaaatgaaatgaacttccttatatagaggaagggtcttgcgaaggatagtgggattgtgcgtcatcccttacgtcagtggagatatcacatcaatccacttgctttgaagacgtggttggaacgtcttctttttccacgatgctcctcgtgggtgggggtccatctttgggaccactgtcggcagaggcatcttgaacgatagcctttcctttatcgcaatgatggcatttgtaggtgccaccttccttttctactgtccttttgatcaagtgaccgatagctgggcaatggaatccgaggaggtttcccgatattaccctttgttgaaaagtctcaatagccctttggtcttctgagactgtatctttgatattcttggagtagacgagagtgtcgtgctccaccatgttatcacatcaattcacttgctttgaagacgtggttggaacgtcttctttttccacgatgctcctcgtgggtgggggtccatctttgggaccactgtcggcagaggcatcttgaacgatagcctttcctttatcgcaatgatggcatttgtaggtgccaccttccttttctactgtccttttgatcaagtgacagatagctgggcaatggaatccgaggaggtttcccgatattaccctttgttgaaaagtctcaatagccctttggtcttctgagacctgcaggcaagcaagcatgaatgcctgggcgcgccggagaagaactcgagagggaattgcagatcatgaggcagatggctatttttgtgtcacatatgcgcaaaaagagaggctatatttgtgtccctaggttcttcgttgtattgcagtttccatatcaatctgacttggtcgcatgagaaattgatggttaaataatttgaatctctcatgtagtatcaactattagatattattttcaccaaatatatttccatcggagaagaagaggctacagaggaagcagaagagaggggtgggagaatttttacacttttgtacacccacttaaacagcaaaatccgtatgaaaacaggcccaccaaaacaatgccacgataacaatccgtagaaacaaaagcttcatttaacagcggcgcaacaaagcacgcttatccatggtagttgtagtccgtatgcgatccaaagatcacgattcacgcgtgacggacggacgacgcgtgccacaccacaactaacggcatccatggtagttgtagtccgtatgcgatccaaagatcacgattcacgcgtgacggacggacgacgcgcgccacaccacaactaacagcgtgagccagcgtccaaactccggatggcaacggggacgaaacccgtcgggtagtcactgcccaaacccgtccccgcaaccttcatcccaaacccgtccccgtttccggtcgcgggtttcagttttctaccagacccgtccccatcgggtttttcatccccgtcgggaaatccgaacccgccagcatttcagcaccaagccaaagttgcagcagcaacatgaataaaaaacaacccgtttcaacaccaagataaaacaaaacattataatttagacaacatttcacacgtataacaataacatatagttctcacatataacaacaccatttcacacataaaacaacaccatttgggataaaaatatgggctatatcaggccatttttatgggccatattgagttttcgtgggtttcacaggtaccggatttgtagaatgctgaaccgggtttgaaccgtaaaatccgcgggtattgaatttgacccaatcccgtcgtcccctggtggggtaaaaacaccatcttgagtccaaacggccaccaaccaaactccgacggcaacaaacaaacggcgttgctttgctcctcggtatctccgtgaccgctcaatctcccggctgtttccccggaattgcgtggactctctcatccacacgcaaaccgcctctccctcctctctcgtcctatccgccccggtgccgtagcctcacgggactcttcttcctcccttgctataaaatccccgccccctcccgtctcctctccacacatccaaactctcaatcgcaccgagaaaaatctcctagcgatcgaagcgaagcctctcccgatcctctcaaggtacgcccgtttcccgtcgatcctcctccttccgttcgtgttctgtagccgatcgattcgattcccttacacccgttcgtgttctctcgtggatcgatcgattgtttgttgctagaaggaactcgtagatctggcgtttatgaactgtgattcgggttagtccagatcgattcaggtcggtcgtcgttgagcctctcggctatgtctggattatcgtgtagatctgctggttcagttgattatgttcttctaggagtaatttcgttgggtcagcgcgatttctgcttaatctatgctgcttattgcgcctgtacctatctactaagctatgtgcacctgtaattttgctagattattcgttcatcctcgtagttggtttgtcacagtaatccgtatgggttctgacgatgttattgttggtcatacctaggcttctccagattttattttgttaaaattggatagatctgctactgatagttgatgatggaatttggtgctgaatctatgctatttattgcgcctatacctgatctatcgggctatgtacggctgtagtttactggattattcgttcatcctcggtagttggttcatcgtttgggttctgacgataatattgttgattatgcgtaggcttctgcagattgttgttaaaattggatacatcggttactgatggttgatgatagatttgtgctgaacctatctgtttattgctcctatacctgatctatagggctatgtatgcctgtaatttaccagattattcgttcatcctcgtagttggttcatctctataattcgtatgggttcttatgatgttatcgttgattatgcctagtcttatacagattattgtgtcaagattgaatatacctgctactgatcggtgataatttggttagtagtttgcaatctgctaggaacacgttaccactgtaatctgtaaacatggtttgccagagtagtttgttctactactcttgatatggttgctgattttagtcgcctccttttggatcatgtattgatgtccttgcagatttccgtgtacttaccccggcttttgtgtacttcgtgttaacaggtttaaacgaagcaaacatggcatctagcatggctccaaagaagaagaggaaggtcaacaacggcacgaacaacttccagaatttcattggcatttccagcctccagaagacgctccgcaacgccctgatccccaccgagaccacgcagcagttcatcgtgaagaacggcatcatcaaggaggacgagctgcgcggcgagaacaggcagatcctcaaggacatcatggacgactactaccgcggcttcatctccgagacgctctccagcatcgacgacatcgactggacgagcctgttcgagaagatggagatccagctcaagaacggcgacaacaaggacaccctgatcaaggagcagacggagtaccgcaaggccatccacaagaagttcgcgaacgacgacaggttcaagaacatgttctccgccaagctgatcagcgacatcctcccggagttcgtgatccacaacaacaactactccgccagcgagaaggaggagaagacccaggtcatcaagctcttctcccgcttcgcgacgagcttcaaggactacttcaagaacagggccaactgcttctccgcggacgacatctccagctccagctgccacaggatcgtgaacgacaacgccgagatcttcttcagcaacgcgctggtgtaccgcaggatcgtcaagtccctcagcaacgacgacatcaacaagatctccggcgacatgaaggactccctgaaggagatgagcctcgaggagatctacagctacgagaagtacggcgagttcatcacccaggagggcatctccttctacaacgacatctgcggcaaggtcaacagcttcatgaacctctactgccagaagaacaaggagaacaagaacctctacaagctgcagaagctccacaagcagatcctgtgcatcgccgacacgtcctacgaggtgccgtacaagttcgagtccgacgaggaggtgtaccagagcgtcaacggcttcctggacaacatctccagcaagcacatcgtcgagcgcctcaggaagatcggcgacaactacaacggctacaacctggacaagatctacatcgtgagcaagttctacgagtccgtcagccagaagacctaccgcgactgggagacgatcaacacggcgctggagatccactacaacaacatcctccccggcaacggcaagtccaaggccgacaaggtgaagaaggcggtcaagaacgacctccagaagagcatcaccgagatcaacgagctggtgtccaactacaagctctgcagcgacgacaacatcaaggccgagacgtacatccacgagatctcccacatcctgaacaacttcgaggcgcaggagctcaagtacaacccggagatccacctggtcgagtccgagctcaaggccagcgagctgaagaacgtgctcgacgtcatcatgaacgcgttccactggtgcagcgtgttcatgaccgaggagctggtcgacaaggacaacaacttctacgccgagctcgaggagatctacgacgagatctaccccgtgatctccctgtacaacctcgtgcgcaactacgtcacccagaagccgtacagcacgaagaagatcaagctcaacttcggcatcccgaccctggcggacggctggtccaagagcaaggagtactccaacaacgcgatcatcctgatgagggacaacctgtactacctcggcatcttcaacgcgaagaacaagccggacaagaagatcatcgagggcaacacgagcgagaacaagggcgactacaagaagatgatctacaacctcctgccgggccccaacaagatgatcccgaaggtgttcctctccagcaagaccggcgtcgagacgtacaagccctccgcctacatcctggagggctacaagcagaacaagcacatcaagtccagcaaggacttcgacatcaccttctgccacgacctcatcgactacttcaagaactgcatcgcgatccaccccgagtggaagaacttcggcttcgacttctccgacaccagcacgtacgaggacatctccggcttctaccgcgaggtggagctgcagggctacaagatcgactggacgtacatcagcgagaaggacatcgacctcctgcaggagaagggccagctctacctgttccagatctacaacaaggacttctccaagaagagcaccggcaacgacaacctccacacgatgtacctgaagaacctcttctccgaggagaacctgaaggacatcgtcctcaagctgaacggcgaggccgagatcttcttcaggaagtccagcatcaagaacccgatcatccacaagaagggcagcatcctcgtgaaccgcacctacgaggcggaggagaaggaccagttcggcaacatccagatcgtcaggaagaacatccccgagaacatctaccaggagctgtacaagtacttcaacgacaagtccgacaaggagctgagcgacgaggccgcgaagctcaagaacgtggtgggccaccacgaggcggccaccaacatcgtgaaggactaccgctacacgtacgacaagtacttcctgcacatgccgatcaccatcaacttcaaggccaacaagacgggcttcatcaacgacaggatcctgcagtacatcgcgaaggagaaggacctccacgtcatcggcatcgaccgcggcgagaggaacctcatctacgtgtccgtcatcgacacctgcggcaacatcgtggagcagaagagcttcaacatcgtcaacggctacgactaccagatcaagctgaagcagcaggagggcgctaggcagatcgccaggaaggagtggaaggagatcggcaagatcaaggagatcaaggagggctacctctccctcgtgatccacgagatcagcaagatggtcatcaagtacaacgccatcatcgcgatggaggacctctcctacggcttcaagaaggggcgcttcaaggtggagaggcaggtctaccagaagttcgagacgatgctgatcaacaagctgaactacctcgtgttcaaggacatcagcatcaccgagaacggcggcctcctgaagggctaccagctgacgtacatccccgacaagctcaagaacgtgggccaccagtgcggctgcatcttctacgtcccggccgcgtacacctccaagatcgaccccaccacgggcttcgtgaacatcttcaagttcaaggacctcacggtcgacgccaagcgcgagttcatcaagaagttcgactccatccgctacgacagcgagaagaacctgttctgcttcaccttcgactacaacaacttcatcacccagaacaccgtgatgtccaagtccagctggagcgtgtacacgtacggcgtccgcatcaagcgcaggttcgtcaacggcaggttctccaacgagagcgacaccatcgacatcacgaaggacatggagaagaccctcgagatgacggacatcaactggagggacggccacgacctgaggcaggacatcatcgactacgagatcgtgcagcacatcttcgagatcttccgcctcaccgtccagatgaggaactccctgagcgagctcgaggaccgcgactacgacaggctgatctccccggtgctcaacgagaacaacatcttctacgactcggctaaggccggcgacgctctgcccaaggacgcggacgccaacggcgcttactgcatcgcgctgaagggcctctacgagatcaagcagatcacggagaactggaaggaggacggcaagttcagccgcgacaagctcaagattagcaacaaggattggttcgatttcattcagaacaagcggtacctgaagcggccagcggcgactaagaaggcgggccaggcaaagaagaagaagtgagtcgaccgatcgttcaaacatttggcaataaagtttcttaagattgaatcctgttgccggtcttgcgatgattatcatataatttctgttgaattacgttaagcatgtaataattaacatgtaatgcatgacgttatttatgagatgggtttttatgattagagtcccgcaattatacatttaatacgcgatagaaaacaaaatatagcgcgcaaactaggataaattatcgcgcgcggtgtcatctatgttactagatcgatccc

SEQ ID NO: 166 - DNA, 3864 bp, Artificial Sequence
  Mad7
atggctccaaagaagaagaggaaggtcaacaacggcacgaacaacttccagaatttcattggcatttccagcctccagaagacgctccgcaacgccctgatccccaccgagaccacgcagcagttcatcgtgaagaacggcatcatcaaggaggacgagctgcgcggcgagaacaggcagatcctcaaggacatcatggacgactactaccgcggcttcatctccgagacgctctccagcatcgacgacatcgactggacgagcctgttcgagaagatggagatccagctcaagaacggcgacaacaaggacaccctgatcaaggagcagacggagtaccgcaaggccatccacaagaagttcgcgaacgacgacaggttcaagaacatgttctccgccaagctgatcagcgacatcctcccggagttcgtgatccacaacaacaactactccgccagcgagaaggaggagaagacccaggtcatcaagctcttctcccgcttcgcgacgagcttcaaggactacttcaagaacagggccaactgcttctccgcggacgacatctccagctccagctgccacaggatcgtgaacgacaacgccgagatcttcttcagcaacgcgctggtgtaccgcaggatcgtcaagtccctcagcaacgacgacatcaacaagatctccggcgacatgaaggactccctgaaggagatgagcctcgaggagatctacagctacgagaagtacggcgagttcatcacccaggagggcatctccttctacaacgacatctgcggcaaggtcaacagcttcatgaacctctactgccagaagaacaaggagaacaagaacctctacaagctgcagaagctccacaagcagatcctgtgcatcgccgacacgtcctacgaggtgccgtacaagttcgagtccgacgaggaggtgtaccagagcgtcaacggcttcctggacaacatctccagcaagcacatcgtcgagcgcctcaggaagatcggcgacaactacaacggctacaacctggacaagatctacatcgtgagcaagttctacgagtccgtcagccagaagacctaccgcgactgggagacgatcaacacggcgctggagatccactacaacaacatcctccccggcaacggcaagtccaaggccgacaaggtgaagaaggcggtcaagaacgacctccagaagagcatcaccgagatcaacgagctggtgtccaactacaagctctgcagcgacgacaacatcaaggccgagacgtacatccacgagatctcccacatcctgaacaacttcgaggcgcaggagctcaagtacaacccggagatccacctggtcgagtccgagctcaaggccagcgagctgaagaacgtgctcgacgtcatcatgaacgcgttccactggtgcagcgtgttcatgaccgaggagctggtcgacaaggacaacaacttctacgccgagctcgaggagatctacgacgagatctaccccgtgatctccctgtacaacctcgtgcgcaactacgtcacccagaagccgtacagcacgaagaagatcaagctcaacttcggcatcccgaccctggcggacggctggtccaagagcaaggagtactccaacaacgcgatcatcctgatgagggacaacctgtactacctcggcatcttcaacgcgaagaacaagccggacaagaagatcatcgagggcaacacgagcgagaacaagggcgactacaagaagatgatctacaacctcctgccgggccccaacaagatgatcccgaaggtgttcctctccagcaagaccggcgtcgagacgtacaagccctccgcctacatcctggagggctacaagcagaacaagcacatcaagtccagcaaggacttcgacatcaccttctgccacgacctcatcgactacttcaagaactgcatcgcgatccaccccgagtggaagaacttcggcttcgacttctccgacaccagcacgtacgaggacatctccggcttctaccgcgaggtggagctgcagggctacaagatcgactggacgtacatcagcgagaaggacatcgacctcctgcaggagaagggccagctctacctgttccagatctacaacaaggacttctccaagaagagcaccggcaacgacaacctccacacgatgtacctgaagaacctcttctccgaggagaacctgaaggacatcgtcctcaagctgaacggcgaggccgagatcttcttcaggaagtccagcatcaagaacccgatcatccacaagaagggcagcatcctcgtgaaccgcacctacgaggcggaggagaaggaccagttcggcaacatccagatcgtcaggaagaacatccccgagaacatctaccaggagctgtacaagtacttcaacgacaagtccgacaaggagctgagcgacgaggccgcgaagctcaagaacgtggtgggccaccacgaggcggccaccaacatcgtgaaggactaccgctacacgtacgacaagtacttcctgcacatgccgatcaccatcaacttcaaggccaacaagacgggcttcatcaacgacaggatcctgcagtacatcgcgaaggagaaggacctccacgtcatcggcatcgaccgcggcgagaggaacctcatctacgtgtccgtcatcgacacctgcggcaacatcgtggagcagaagagcttcaacatcgtcaacggctacgactaccagatcaagctgaagcagcaggagggcgctaggcagatcgccaggaaggagtggaaggagatcggcaagatcaaggagatcaaggagggctacctctccctcgtgatccacgagatcagcaagatggtcatcaagtacaacgccatcatcgcgatggaggacctctcctacggcttcaagaaggggcgcttcaaggtggagaggcaggtctaccagaagttcgagacgatgctgatcaacaagctgaactacctcgtgttcaaggacatcagcatcaccgagaacggcggcctcctgaagggctaccagctgacgtacatccccgacaagctcaagaacgtgggccaccagtgcggctgcatcttctacgtcccggccgcgtacacctccaagatcgaccccaccacgggcttcgtgaacatcttcaagttcaaggacctcacggtcgacgccaagcgcgagttcatcaagaagttcgactccatccgctacgacagcgagaagaacctgttctgcttcaccttcgactacaacaacttcatcacccagaacaccgtgatgtccaagtccagctggagcgtgtacacgtacggcgtccgcatcaagcgcaggttcgtcaacggcaggttctccaacgagagcgacaccatcgacatcacgaaggacatggagaagaccctcgagatgacggacatcaactggagggacggccacgacctgaggcaggacatcatcgactacgagatcgtgcagcacatcttcgagatcttccgcctcaccgtccagatgaggaactccctgagcgagctcgaggaccgcgactacgacaggctgatctccccggtgctcaacgagaacaacatcttctacgactcggctaaggccggcgacgctctgcccaaggacgcggacgccaacggcgcttactgcatcgcgctgaagggcctctacgagatcaagcagatcacggagaactggaaggaggacggcaagttcagccgcgacaagctcaagattagcaacaaggattggttcgatttcattcagaacaagcggtacctgaagcggccagcggcgactaagaaggcgggccaggcaaagaagaagaagtga

SEQ ID NO: 167 - protein, 1287 aa, Artificial Sequence
  MAD7
MAPKKKRKVNNGTNNFQNFIGISSLQKTLRNALIPTETTQQFIVKNGIIKEDELRGENRQILKDIMDDYYRGFISETLSSIDDIDWTSLFEKMEIQLKNGDNKDTLIKEQTEYRKAIHKKFANDDRFKNMFSAKLISDILPEFVIHNNNYSASEKEEKTQVIKLFSRFATSFKDYFKNRANCFSADDISSSSCHRIVNDNAEIFFSNALVYRRIVKSLSNDDINKISGDMKDSLKEMSLEEIYSYEKYGEFITQEGISFYNDICGKVNSFMNLYCQKNKENKNLYKLQKLHKQILCIADTSYEVPYKFESDEEVYQSVNGFLDNISSKHIVERLRKIGDNYNGYNLDKIYIVSKFYESVSQKTYRDWETINTALEIHYNNILPGNGKSKADKVKKAVKNDLQKSITEINELVSNYKLCSDDNIKAETYIHEISHILNNFEAQELKYNPEIHLVESELKASELKNVLDVIMNAFHWCSVFMTEELVDKDNNFYAELEEIYDEIYPVISLYNLVRNYVTQKPYSTKKIKLNFGIPTLADGWSKSKEYSNNAIILMRDNLYYLGIFNAKNKPDKKIIEGNTSENKGDYKKMIYNLLPGPNKMIPKVFLSSKTGVETYKPSAYILEGYKQNKHIKSSKDFDITFCHDLIDYFKNCIAIHPEWKNFGFDFSDTSTYEDISGFYREVELQGYKIDWTYISEKDIDLLQEKGQLYLFQIYNKDFSKKSTGNDNLHTMYLKNLFSEENLKDIVLKLNGEAEIFFRKSSIKNPIIHKKGSILVNRTYEAEEKDQFGNIQIVRKNIPENIYQELYKYFNDKSDKELSDEAAKLKNVVGHHEAATNIVKDYRYTYDKYFLHMPITINFKANKTGFINDRILQYIAKEKDLHVIGIDRGERNLIYVSVIDTCGNIVEQKSFNIVNGYDYQIKLKQQEGARQIARKEWKEIGKIKEIKEGYLSLVIHEISKMVIKYNAIIAMEDLSYGFKKGRFKVERQVYQKFETMLINKLNYLVFKDISITENGGLLKGYQLTYIPDKLKNVGHQCGCIFYVPAAYTSKIDPTTGFVNIFKFKDLTVDAKREFIKKFDSIRYDSEKNLFCFTFDYNNFITQNTVMSKSSWSVYTYGVRIKRRFVNGRFSNESDTIDITKDMEKTLEMTDINWRDGHDLRQDIIDYEIVQHIFEIFRLTVQMRNSLSELEDRDYDRLISPVLNENNIFYDSAKAGDALPKDADANGAYCIALKGLYEIKQITENWKEDGKFSRDKLKISNKDWFDFIQNKRYLKRPAATKKAGQAKKKK

SEQ ID NO: 168 - DNA, 717 bp, Artificial Sequence
  tdTomato
tcaggtacctctagacttgtacagctcgtccatgccgtacaggaacaggtggtggcggccctcggagcgctcgtactgttccacgatggtgtagtcctcgttgtgggaggtgatgtccagcttggtgtccacgtagtagtagccgggcagttgcacgggcttcttggccatgtagatggtcttgaactccaccaggtagtggccgccgtccttcagcttcagggcctggtggatctcgcccttcagcacgccgtcgcgggggtacaggcgctcggtggaggcctcccagcccatggtcttcttctgcattacggggccgtcgggggggaagttggtgccgcgcatcttcaccttgtagatcagcgtgccgtcctgcagggaggagtcctgggtcacggtcaccagaccgccgtcctcgaagttcatcacgcgctcccacttgaagccctcggggaaggacagcttcttgtaatcggggatgtcggcggggtgcttcacgtacgccttggagccgtacatgaactggggggacaggatgtcccaggcgaagggcagggggccgcccttggtcaccttcagcttggcggtctgggtgccctcgtaggggcggccctcgccctcgccctcgatctcgaactcgtggccgttcatggagccctccatgcgcaccttgaagcgcatgaactctttgatgacctcctcgcccttgctcaccat

SEQ ID NO: 169 - protein, 238 aa, Artificial Sequence
  tdTomato
MVSKGEEVIKEFMRFKVRMEGSMNGHEFEIEGEGEGRPYEGTQTAKLKVTKGGPLPFAWDILSPQFMYGSKAYVKHPADIPDYKKLSFPEGFKWERVMNFEDGGLVTVTQDSSLQDGTLIYKVKMRGTNFPPDGPVMQKKTMGWEASTERLYPRDGVLKGEIHQALKLKDGGHYLVEFKTIYMAKKPVQLPGYYYVDTKLDITSHNEDYTIVEQYERSEGRHHLFLYGMDELYKSRGT

SEQ ID NO: 170 - DNA, 5865 bp, Artificial Sequence
  Vector encoding RBP2
agcttacgcgtgtcgactcgaatttccccgatcgttcaaacatttggcaataaagtttcttaagattgaatcctgttgccggtcttgcgatgattatcatataatttctgttgaattacgttaagcatgtaataattaacatgtaatgcatgacgttatttatgagatgggtttttatgattagagtcccgcaattatacatttaatacgcgatagaaaacaaaatatagcgcgcaaactaggataaattatcgcgcgcggtgtcatctatgttactagatcgctcgacgcggccgccatggccagatcgtacccaattcgccctatagtgagtcgtattacaattcactggccgtcgttttacaacgtcgtgactgggaaaaccctggcgttacccaacttaatcgccttgcagcacatccccctttcgccagctggcgtaatagcgaagaggcccgcaccgatcgcccttcccaacagttgcgcagcctgaatggcgaatggaaattgtaagcgttaatattttgttaaaattcgcgttaaatttttgttaaatcagctcattttttaaccaataggccgaaatcggcaaaatcccttataaatcaaaagaatagaccgagatagggttgagtgttgttccagtttggaacaagagtccactattaaagaacgtggactccaacgtcaaagggcgaaaaaccgtctatcagggcgatggcccactacgtgaaccatcaccctaatcaagttttttggggtcgaggtgccgtaaagcactaaatcggaaccctaaagggagcccccgatttagagcttgacggggaaagccggcgaacgtggcgagaaaggaagggaagaaagcgaaaggagcgggcgctagggcgctggcaagtgtagcggtcacgctgcgcgtaaccaccacacccgccgcgcttaatgcgccgctacagggcgcgtcaggtggcacttttcggggaaatgtgcgcggaacccctatttgtttatttttctaaatacattcaaatatgtatccgctcatgagacaataaccctgataaatgcttcaataatattgaaaaaggaagagtatgagtattcaacatttccgtgtcgcccttattcccttttttgcggcattttgccttcctgtttttgctcacccagaaacgctggtgaaagtaaaagatgctgaagatcagttgggtgcacgagtgggttacatcgaactggatctcaacagcggtaagatccttgagagttttcgccccgaagaacgttttccaatgatgagcacttttaaagttctgctatgtggcgcggtattatcccgtattgacgccgggcaagagcaactcggtcgccgcatacactattctcagaatgacttggttgagtactcaccagtcacagaaaagcatcttacggatggcatgacagtaagagaattatgcagtgctgccataaccatgagtgataacactgcggccaacttacttctgacaacgatcggaggaccgaaggagctaaccgcttttttgcacaacatgggggatcatgtaactcgccttgatcgttgggaaccggagctgaatgaagccataccaaacgacgagcgtgacaccacgatgcctgtagcaatggcaacaacgttgcgcaaactattaactggcgaactacttactctagcttcccggcaacaattaatagactggatggaggcggataaagttgcaggaccacttctgcgctcggcccttccggctggctggtttattgctgataaatctggagccggtgagcgtgggtctcgcggtatcattgcagcactggggccagatggtaagccctcccgtatcgtagttatctacacgacggggagtcaggcaactatggatgaacgaaatagacagatcgctgagataggtgcctcactgattaagcattggtaactgtcagaccaagtttactcatatatactttagattgatttaaaacttcatttttaatttaaaaggatctaggtgaagatcctttttgataatctcatgaccaaaatcccttaacgtgagttttcgttccactgagcgtcagaccccgtagaaaagatcaaaggatcttcttgagatcctttttttctgcgcgtaatctgctgcttgcaaacaaaaaaaccaccgctaccagcggtggtttgtttgccggatcaagagctaccaactctttttccgaaggtaactggcttcagcagagcgcagataccaaatactgtccttctagtgtagccgtagttaggccaccacttcaagaactctgtagcaccgcctacatacctcgctctgctaatcctgttaccagtggctgctgccagtggcgataagtcgtgtcttaccgggttggactcaagacgatagttaccggataaggcgcagcggtcgggctgaacggggggttcgtgcacacagcccagcttggagcgaacgacctacaccgaactgagatacctacagcgtgagctatgagaaagcgccacgcttcccgaagggagaaaggcggacaggtatccggtaagcggcagggtcggaacaggagagcgcacgagggagcttccagggggaaacgcctggtatctttatagtcctgtcgggtttcgccacctctgacttgagcgtcgatttttgtgatgctcgtcaggggggcggagcctatggaaaaacgccagcaacgcggcctttttacggttcctggccttttgctggccttttgctcacatgttctttcctgcgttatcccctgattctgtggataaccgtattaccgcctttgagtgagctgataccgctcgccgcagccgaacgaccgagcgcagcgagtcagtgagcgaggaagcggaagagcgcccaatacgcaaaccgcctctccccgcgcgttggccgattcattaatgcagctggcacgacaggtttcccgactggaaagcgggcagtgagcgcaacgcaattaatgtgagttagctcactcattaggcaccccaggctttacactttatgcttccggctcgtatgttgtgtggaattgtgagcggataacaatttcacacaggaaacagctatgaccatgattacgccaagctcgaaattaaccctcactaaagggaacaaaagctggactagaggcccttaaggccttactagacttcaccgccattgcaaaaattgtcaataaatatttagagtgggtggcatcagaaaaacatctctagtggactctcttcctatcatagctactcgggctgtagatagaacgagggcacaagagttgggtggcgtaggtttactcgtgacctcaactcttttggctgtgtcttacgtctaagatgggtttggcatgtgagaaacataggtctaagcaattcatgttagggctgttgcattgttgttgcatcaaccaaatgtccagatagcagttcatgctacatctagttgaaaaccctcatcattaggcggaacatgtgttcttttttagcatagtcaaagtcagattgcggcactcgctcatccacggaaagaattttccctgtgcaggcatctcgatcaaaagacgcaaattaatttttgaatagcgatataacaatatctaattaacgtttcttgttttctgcgaaatgtctttcatcataaaatgagtcatctcgatgagcccaagtgacatagcccaacaccccaccccaccaataaaagtgaagaaaacatgttgggaaaactataccaagtaaaatacgagttgttctaaagaaaaagtaaagtacgagttagatcgcaccctgtcctggagtgtggcttgatgatccaactcctagcattgtatccctgtttttggatgatgtaactattatttacaatgaataaagaggtgttttactagtaaaaaaatcttgaggggaggagaaaataatggaggtcttttttcaaaccgatggactattatttttagtgaaagagaataatattattggaaaaattattctatccacttattttatattggcagaatacaaagaatggtggggtccacgcggaacttgcggcccccgaaacctatcgagggcgcggtacccaagcaaggaacggaggaaacttgcggggcccgaaacctagtgataaaaggcatatcatccacacgatgaagatctgacggaccatatctcccaccacggaaagccatcagacgaggatcagacggccaggaaggaaccctagcgcccgccggtgccaatataaagcgccactctctctcgtcttaagccccagcctctccattcccctctccctctcgccgccgccgtctccttctcctactcccttcgaggtgtgttgttcatccgtcccgaatccatccatcccctcttcagatgtgttgttcatggctctaatagctctagatctgcttgtttgtgttgtttagctctagatctactcgcgcgcgcttctctctcgatctcctgtagaacaattttggttggttttttgtgcatatccatggtaattttgtctgcaatatggaggaggctttctaagctcctacgtagcatcgatctttagaattccctcggtttctgtttatttcttcgcgagggctctctgttatctgtaggagtagctgtaagcgcggttcgttacggattaatcgtcatgcttagttgaacctatcggtcgaaggatttgtgtgggttgtcgtgtagaattgacaccatctacttactgtactgatatgccgatctgtaggatactcttcattacttttgtttactgctagttgtggtgtagatttagcattctcaaacccatgctgtagcgtttctaatattgttacatagatctaccggtgcctgttaattgtattcgatcgggcgtttctacatctgtccgcccacctagttttatatgtggtaatcaaaattgcgttgacttcgtgatgctgtctgtgtactgtttttaatcgctcttacttagatgatcaacatggtgatggttacgatttactgttttctaatccctgttacttcgatgctgcagtttggatccatggaatcgggctccggcacggcggcagggtctggttatgtctatcggcagagcggaagcacccggtggaatccaacagcagaacagttgtcgctgctcaaggaactttattaccggaatggaattcggacaccgtcggcagatcaaattaggcaaatttcggcccggctgtccagatacggcaaaatagaagggaaaaacgtcttttactggtttcaaaatcataaagcacgggaacggcagaagaaaagactttccacggtcggctgcgaccctgctctcatagaaatgggtaacgtcgcgagcttggaatttgggaccgaaagcgctcttgaatctctcagctcaggcccgtccagcgagttgcgcgaggctcctacccgcaagttttatgagaagaaaaccgttggtgagaacagcaccataatcaatcctgttgagcagaactgcacactttcttgcggtacttcgcaggaatttcagtatgctgttgatagccgccgggtgatgaaggcaatggaagagaagcaagcaacggatgatgaaccggacggaaacaaatggacggagtcgaacaggcatgtgaagaccctccctcttttccccttgcataataatgaagatcagaccttgatcaagtcggacaaggaaatttattgccttgggagctgtgaaaaaaaaatggatctgtccccattgggacactcgggctctcagagggcgtcggcactggatttgtgcctgtctttgggtaatgaatcttgtggcctccacgacaattgaa

SEQ ID NO: 171 - DNA, 783 bp, Artificial Sequence
  RBP2
atggaatcgggctccggcacggcggcagggtctggttatgtctatcggcagagcggaagcacccggtggaatccaacagcagaacagttgtcgctgctcaaggaactttattaccggaatggaattcggacaccgtcggcagatcaaattaggcaaatttcggcccggctgtccagatacggcaaaatagaagggaaaaacgtcttttactggtttcaaaatcataaagcacgggaacggcagaagaaaagactttccacggtcggctgcgaccctgctctcatagaaatgggtaacgtcgcgagcttggaatttgggaccgaaagcgctcttgaatctctcagctcaggcccgtccagcgagttgcgcgaggctcctacccgcaagttttatgagaagaaaaccgttggtgagaacagcaccataatcaatcctgttgagcagaactgcacactttcttgcggtacttcgcaggaatttcagtatgctgttgatagccgccgggtgatgaaggcaatggaagagaagcaagcaacggatgatgaaccggacggaaacaaatggacggagtcgaacaggcatgtgaagaccctccctcttttccccttgcataataatgaagatcagaccttgatcaagtcggacaaggaaatttattgccttgggagctgtgaaaaaaaaatggatctgtccccattgggacactcgggctctcagagggcgtcggcactggatttgtgcctgtctttgggtaatgaatcttgtggcctccacgacaattga

SEQ ID NO: 172 - protein, 260 aa, Artificial Sequence
  RBP2
MESGSGTAAGSGYVYRQSGSTRWNPTAEQLSLLKELYYRNGIRTPSADQIRQISARLSRYGKIEGKNVFYWFQNHKARERQKKRLSTVGCDPALIEMGNVASLEFGTESALESLSSGPSSELREAPTRKFYEKKTVGENSTIINPVEQNCTLSCGTSQEFQYAVDSRRVMKAMEEKQATDDEPDGNKWTESNRHVKTLPLFPLHNNEDQTLIKSDKEIYCLGSCEKKMDLSPLGHSGSQRASALDLCLSLGNESCGLHDN

SEQ ID NO: 173 - DNA, 3852 bp, Artificial Sequence
  Vector encoding gRNA
tttagaaaaataaacaaataggggttccgcgcacatttccccgaaaagtgccacctgacgcgccctgtagcggcctgcagtgcagcgtgacccggtcgtgcccctctctagagataatgagcattgcatgtctaagttataaaaaattaccacatattttttttgtcacacttgtttgaagtgcagtttatctatctttatacatatatttaaactttactctacgaataatataatctatagtactacaataatatcagtgttttagagaatcatataaatgaacagttagacatggtctaaaggacaattgagtattttgacaacaggactctacagttttatctttttagtgtgcatgtgttctcctttttttttgcaaatagcttcacctatataatacttcatccattttattagtacatccatttagggtttagggttaatggtttttatagactaatttttttagtacatctattttattctattttagcctctaaattaagaaaactaaaactctattttagtttttttatttaataatttagatataaaatagaataaaataaagtgactaaaaattaaacaaataccctttaagaaattaaaaaaactaaggaaacatttttcttgtttcgagtagataatgccagcctgttaaacgccgtcgatcgacgagtctaacggacaccaaccagcgaaccagcagcgtcgcgtcgggccaagcgaagcagacggcacggcatctctgtcgctgcctctggacccctctcgagagttccgctccaccgttggacttgctccgctgtcggcatccagaaattgcgtggcggagcggcagacgtgagccggcacggcaggcggcctcctcctcctctcacggcaccggcagctacgggggattcctttcccaccgctccttcgctttcccttcctcgcccgccgtaataaatagacaccccctccacaccctctttccccaacctcgtgttgttcggagcgcacacacacacaaccagatctcccccaaatccacccgtcggcacctccgcttcaaggtacgccgctcgtcctccccccccccccctctctaccttctctagatcggcgttccggtccatggttagggcccggtagttctacttctgttcatgtttgtgttagatccgtgtttgtgttagatccgtgctgctagcgttcgtacacggatgcgacctgtacgtcagacacgttctgattgctaacttgccagtgtttctctttggggaatcctgggatggctctagccgttccgcagacgggatcgatctaggataggtatacatgttgatgtgggttttactgatgcatatacatgatggcatatgcagcatctattcatatgctctaaccttgagtacctatctattataataaacaagtatgttttataattattttgatcttgatatacttggatgatggcatatgcagcagctatatgtggatttttttagccctgccttcatacgctatttatttgcttggtactgtttcttttgtcgatgctcaccctgttgtttggtgttacttctgcagggatccaaattactgatgagtccgtgaggacgaaacgagtaagctcgtcgtcaaaagacctttttaatttctactcttgtagataggcgacatatggaatagacaggccggcatggtcccagcctcctcgctggcgccggctgggcaacatgcttcggcatggcgaatgggaccgatcgttcaaacatttggcaataaagtttcttaagattgaatcctgttgccggtcttgcgatgattatcatataatttctgttgaattacgttaagcatgtaataattaacatgtaatgcatgacgttatttatgagatgggtttttatgattagagtcccgcaattatacatttaatacgcgatagaaaacaaaatatagcgcgcaaactaggataaattatcgcgcgcggtgtcatctatgttactagatcgatcgtcgttcggctgcggcgagcggtatcagctcactcaaaggcggtaatacggttatccacagaatcaggggataacgcaggaaagaacatgtgagcaaaaggccagcaaaaggccaggaaccgtaaaaaggccgcgttgctggcgtttttccataggctccgcccccctgacgagcatcacaaaaatcgacgctcaagtcagaggtggcgaaacccgacaggactataaagataccaggcgtttccccctggaagctccctcgtgcgctctcctgttccgaccctgccgcttaccggatacctgtccgcctttctcccttcgggaagcgtggcgctttctcatagctcacgctgtaggtatctcagttcggtgtaggtcgttcgctccaagctgggctgtgtgcacgaaccccccgttcagcccgaccgctgcgccttatccggtaactatcgtcttgagtccaacccggtaagacacgacttatcgccactggcagcagccactggtaacaggattagcagagcgaggtatgtaggcggtgctacagagttcttgaagtggtggcctaactacggctacactagaagaacagtatttggtatctgcgctctgctgaagccagttaccttcggaaaaagagttggtagctcttgatccggcaaacaaaccaccgctggtagcggtggtttttttgtttgcaagcagcagattacgcgcagaaaaaaaggatctcaagaagatcctttgatcttttctacggggtctgacgctcagtggaacgaaaactcacgttaagggattttggtcatgagattatcaaaaaggatcttcacctagatccttttaaattaaaaatgaagttttaaatcaatctaaagtatatatgagtaaacttggtctgacagttaccaatgcttaatcagtgaggcacctatctcagcgatctgtctatttcgttcatccatagttgcctgactccccgtcgtgtagataactacgatacgggagggcttaccatctggccccagtgctgcaatgataccgcgagacccacgctcaccggctccagatttatcagcaataaaccagccagccggaagggccgagcgcagaagtggtcctgcaactttatccgcctccatccagtctattaattgttgccgggaagctagagtaagtagttcgccagttaatagtttgcgcaacgttgttgccattgctacaggcatcgtggtgtcacgctcgtcgtttggtatggcttcattcagctccggttcccaacgatcaaggcgagttacatgatcccccatgttgtgcaaaaaagcggttagctccttcggtcctccgatcgttgtcagaagtaagttggccgcagtgttatcactcatggttatggcagcactgcataattctcttactgtcatgccatccgtaagatgcttttctgtgactggtgagtactcaaccaagtcattctgagaatagtgtatgcggcgaccgagttgctcttgcccggcgtcaatacgggataataccgcgccacatagcagaactttaaaagtgctcatcattggaaaacgttcttcggggcgaaaactctcaaggatcttaccgctgttgagatccagttcgatgtaacccactcgtgcacccaactgatcttcagcatcttttactttcaccagcgtttctgggtgagcaaaaacaggaaggcaaaatgccgcaaaaaagggaataagggcgacacggaaatgttgaatactcatactcttcctttttcaatattattgaagcatttatcagggttattgtctcatgagcggatacatatttgaatgta

SEQ ID NO: 174 - DNA, 3852 bp, Artificial Sequence
  Vector encoding gRNA
tttagaaaaataaacaaataggggttccgcgcacatttccccgaaaagtgccacctgacgcgccctgtagcggcctgcagtgcagcgtgacccggtcgtgcccctctctagagataatgagcattgcatgtctaagttataaaaaattaccacatattttttttgtcacacttgtttgaagtgcagtttatctatctttatacatatatttaaactttactctacgaataatataatctatagtactacaataatatcagtgttttagagaatcatataaatgaacagttagacatggtctaaaggacaattgagtattttgacaacaggactctacagttttatctttttagtgtgcatgtgttctcctttttttttgcaaatagcttcacctatataatacttcatccattttattagtacatccatttagggtttagggttaatggtttttatagactaatttttttagtacatctattttattctattttagcctctaaattaagaaaactaaaactctattttagtttttttatttaataatttagatataaaatagaataaaataaagtgactaaaaattaaacaaataccctttaagaaattaaaaaaactaaggaaacatttttcttgtttcgagtagataatgccagcctgttaaacgccgtcgatcgacgagtctaacggacaccaaccagcgaaccagcagcgtcgcgtcgggccaagcgaagcagacggcacggcatctctgtcgctgcctctggacccctctcgagagttccgctccaccgttggacttgctccgctgtcggcatccagaaattgcgtggcggagcggcagacgtgagccggcacggcaggcggcctcctcctcctctcacggcaccggcagctacgggggattcctttcccaccgctccttcgctttcccttcctcgcccgccgtaataaatagacaccccctccacaccctctttccccaacctcgtgttgttcggagcgcacacacacacaaccagatctcccccaaatccacccgtcggcacctccgcttcaaggtacgccgctcgtcctccccccccccccctctctaccttctctagatcggcgttccggtccatggttagggcccggtagttctacttctgttcatgtttgtgttagatccgtgtttgtgttagatccgtgctgctagcgttcgtacacggatgcgacctgtacgtcagacacgttctgattgctaacttgccagtgtttctctttggggaatcctgggatggctctagccgttccgcagacgggatcgatctaggataggtatacatgttgatgtgggttttactgatgcatatacatgatggcatatgcagcatctattcatatgctctaaccttgagtacctatctattataataaacaagtatgttttataattattttgatcttgatatacttggatgatggcatatgcagcagctatatgtggatttttttagccctgccttcatacgctatttatttgcttggtactgtttcttttgtcgatgctcaccctgttgtttggtgttacttctgcagggatccaaattactgatgagtccgtgaggacgaaacgagtaagctcgtcgtcaaaagacctttttaatttctactcttgtagatgtagtagtggtatatctccctggccggcatggtcccagcctcctcgctggcgccggctgggcaacatgcttcggcatggcgaatgggaccgatcgttcaaacatttggcaataaagtttcttaagattgaatcctgttgccggtcttgcgatgattatcatataatttctgttgaattacgttaagcatgtaataattaacatgtaatgcatgacgttatttatgagatgggtttttatgattagagtcccgcaattatacatttaatacgcgatagaaaacaaaatatagcgcgcaaactaggataaattatcgcgcgcggtgtcatctatgttactagatcgatcgtcgttcggctgcggcgagcggtatcagctcactcaaaggcggtaatacggttatccacagaatcaggggataacgcaggaaagaacatgtgagcaaaaggccagcaaaaggccaggaaccgtaaaaaggccgcgttgctggcgtttttccataggctccgcccccctgacgagcatcacaaaaatcgacgctcaagtcagaggtggcgaaacccgacaggactataaagataccaggcgtttccccctggaagctccctcgtgcgctctcctgttccgaccctgccgcttaccggatacctgtccgcctttctcccttcgggaagcgtggcgctttctcatagctcacgctgtaggtatctcagttcggtgtaggtcgttcgctccaagctgggctgtgtgcacgaaccccccgttcagcccgaccgctgcgccttatccggtaactatcgtcttgagtccaacccggtaagacacgacttatcgccactggcagcagccactggtaacaggattagcagagcgaggtatgtaggcggtgctacagagttcttgaagtggtggcctaactacggctacactagaagaacagtatttggtatctgcgctctgctgaagccagttaccttcggaaaaagagttggtagctcttgatccggcaaacaaaccaccgctggtagcggtggtttttttgtttgcaagcagcagattacgcgcagaaaaaaaggatctcaagaagatcctttgatcttttctacggggtctgacgctcagtggaacgaaaactcacgttaagggattttggtcatgagattatcaaaaaggatcttcacctagatccttttaaattaaaaatgaagttttaaatcaatctaaagtatatatgagtaaacttggtctgacagttaccaatgcttaatcagtgaggcacctatctcagcgatctgtctatttcgttcatccatagttgcctgactccccgtcgtgtagataactacgatacgggagggcttaccatctggccccagtgctgcaatgataccgcgagacccacgctcaccggctccagatttatcagcaataaaccagccagccggaagggccgagcgcagaagtggtcctgcaactttatccgcctccatccagtctattaattgttgccgggaagctagagtaagtagttcgccagttaatagtttgcgcaacgttgttgccattgctacaggcatcgtggtgtcacgctcgtcgtttggtatggcttcattcagctccggttcccaacgatcaaggcgagttacatgatcccccatgttgtgcaaaaaagcggttagctccttcggtcctccgatcgttgtcagaagtaagttggccgcagtgttatcactcatggttatggcagcactgcataattctcttactgtcatgccatccgtaagatgcttttctgtgactggtgagtactcaaccaagtcattctgagaatagtgtatgcggcgaccgagttgctcttgcccggcgtcaatacgggataataccgcgccacatagcagaactttaaaagtgctcatcattggaaaacgttcttcggggcgaaaactctcaaggatcttaccgctgttgagatccagttcgatgtaacccactcgtgcacccaactgatcttcagcatcttttactttcaccagcgtttctgggtgagcaaaaacaggaaggcaaaatgccgcaaaaaagggaataagggcgacacggaaatgttgaatactcatactcttcctttttcaatattattgaagcatttatcagggttattgtctcatgagcggatacatatttgaatgta

SEQ ID NO: 175 - DNA, 3852 bp, Artificial Sequence
  Vector encoding gRNA
tttagaaaaataaacaaataggggttccgcgcacatttccccgaaaagtgccacctgacgcgccctgtagcggcctgcagtgcagcgtgacccggtcgtgcccctctctagagataatgagcattgcatgtctaagttataaaaaattaccacatattttttttgtcacacttgtttgaagtgcagtttatctatctttatacatatatttaaactttactctacgaataatataatctatagtactacaataatatcagtgttttagagaatcatataaatgaacagttagacatggtctaaaggacaattgagtattttgacaacaggactctacagttttatctttttagtgtgcatgtgttctcctttttttttgcaaatagcttcacctatataatacttcatccattttattagtacatccatttagggtttagggttaatggtttttatagactaatttttttagtacatctattttattctattttagcctctaaattaagaaaactaaaactctattttagtttttttatttaataatttagatataaaatagaataaaataaagtgactaaaaattaaacaaataccctttaagaaattaaaaaaactaaggaaacatttttcttgtttcgagtagataatgccagcctgttaaacgccgtcgatcgacgagtctaacggacaccaaccagcgaaccagcagcgtcgcgtcgggccaagcgaagcagacggcacggcatctctgtcgctgcctctggacccctctcgagagttccgctccaccgttggacttgctccgctgtcggcatccagaaattgcgtggcggagcggcagacgtgagccggcacggcaggcggcctcctcctcctctcacggcaccggcagctacgggggattcctttcccaccgctccttcgctttcccttcctcgcccgccgtaataaatagacaccccctccacaccctctttccccaacctcgtgttgttcggagcgcacacacacacaaccagatctcccccaaatccacccgtcggcacctccgcttcaaggtacgccgctcgtcctccccccccccccctctctaccttctctagatcggcgttccggtccatggttagggcccggtagttctacttctgttcatgtttgtgttagatccgtgtttgtgttagatccgtgctgctagcgttcgtacacggatgcgacctgtacgtcagacacgttctgattgctaacttgccagtgtttctctttggggaatcctgggatggctctagccgttccgcagacgggatcgatctaggataggtatacatgttgatgtgggttttactgatgcatatacatgatggcatatgcagcatctattcatatgctctaaccttgagtacctatctattataataaacaagtatgttttataattattttgatcttgatatacttggatgatggcatatgcagcagctatatgtggatttttttagccctgccttcatacgctatttatttgcttggtactgtttcttttgtcgatgctcaccctgttgtttggtgttacttctgcagggatccaaattactgatgagtccgtgaggacgaaacgagtaagctcgtcgtcaaaagacctttttaatttctactcttgtagatgtactatgcgtcaacaaagctggccggcatggtcccagcctcctcgctggcgccggctgggcaacatgcttcggcatggcgaatgggaccgatcgttcaaacatttggcaataaagtttcttaagattgaatcctgttgccggtcttgcgatgattatcatataatttctgttgaattacgttaagcatgtaataattaacatgtaatgcatgacgttatttatgagatgggtttttatgattagagtcccgcaattatacatttaatacgcgatagaaaacaaaatatagcgcgcaaactaggataaattatcgcgcgcggtgtcatctatgttactagatcgatcgtcgttcggctgcggcgagcggtatcagctcactcaaaggcggtaatacggttatccacagaatcaggggataacgcaggaaagaacatgtgagcaaaaggccagcaaaaggccaggaaccgtaaaaaggccgcgttgctggcgtttttccataggctccgcccccctgacgagcatcacaaaaatcgacgctcaagtcagaggtggcgaaacccgacaggactataaagataccaggcgtttccccctggaagctccctcgtgcgctctcctgttccgaccctgccgcttaccggatacctgtccgcctttctcccttcgggaagcgtggcgctttctcatagctcacgctgtaggtatctcagttcggtgtaggtcgttcgctccaagctgggctgtgtgcacgaaccccccgttcagcccgaccgctgcgccttatccggtaactatcgtcttgagtccaacccggtaagacacgacttatcgccactggcagcagccactggtaacaggattagcagagcgaggtatgtaggcggtgctacagagttcttgaagtggtggcctaactacggctacactagaagaacagtatttggtatctgcgctctgctgaagccagttaccttcggaaaaagagttggtagctcttgatccggcaaacaaaccaccgctggtagcggtggtttttttgtttgcaagcagcagattacgcgcagaaaaaaaggatctcaagaagatcctttgatcttttctacggggtctgacgctcagtggaacgaaaactcacgttaagggattttggtcatgagattatcaaaaaggatcttcacctagatccttttaaattaaaaatgaagttttaaatcaatctaaagtatatatgagtaaacttggtctgacagttaccaatgcttaatcagtgaggcacctatctcagcgatctgtctatttcgttcatccatagttgcctgactccccgtcgtgtagataactacgatacgggagggcttaccatctggccccagtgctgcaatgataccgcgagacccacgctcaccggctccagatttatcagcaataaaccagccagccggaagggccgagcgcagaagtggtcctgcaactttatccgcctccatccagtctattaattgttgccgggaagctagagtaagtagttcgccagttaatagtttgcgcaacgttgttgccattgctacaggcatcgtggtgtcacgctcgtcgtttggtatggcttcattcagctccggttcccaacgatcaaggcgagttacatgatcccccatgttgtgcaaaaaagcggttagctccttcggtcctccgatcgttgtcagaagtaagttggccgcagtgttatcactcatggttatggcagcactgcataattctcttactgtcatgccatccgtaagatgcttttctgtgactggtgagtactcaaccaagtcattctgagaatagtgtatgcggcgaccgagttgctcttgcccggcgtcaatacgggataataccgcgccacatagcagaactttaaaagtgctcatcattggaaaacgttcttcggggcgaaaactctcaaggatcttaccgctgttgagatccagttcgatgtaacccactcgtgcacccaactgatcttcagcatcttttactttcaccagcgtttctgggtgagcaaaaacaggaaggcaaaatgccgcaaaaaagggaataagggcgacacggaaatgttgaatactcatactcttcctttttcaatattattgaagcatttatcagggttattgtctcatgagcggatacatatttgaatgta

SEQ ID NO: 176 - DNA, 21 bp, Artificial Sequence
  gRNA
aggcgacatatggaatagaca

SEQ ID NO: 177 - DNA, 21 bp, Artificial Sequence
  gRNA
gtagtagtggtatatctccct

SEQ ID NO: 178 - DNA, 21 bp, Artificial Sequence
  gRNA
gtactatgcgtcaacaaagct

SEQ ID NO: 179 - DNA, 5594 bp, Artificial Sequence
  Vector encoding DNA insert
cttccgcttcctcgctcactgactcgctgcgctcggtcgttcggctgcggcgagcggtatcagctcactcaaaggcggtaatacggttatccacagaatcaggggataacgcaggaaagaacatgtgagcaaaaggccagcaaaaggccaggaaccgtaaaaaggccgcgttgctggcgtttttccataggctccgcccccctgacgagcatcacaaaaatcgacgctcaagtcagaggtggcgaaacccgacaggactataaagataccaggcgtttccccctggaagctccctcgtgcgctctcctgttccgaccctgccgcttaccggatacctgtccgcctttctcccttcgggaagcgtggcgctttctcatagctcacgctgtaggtatctcagttcggtgtaggtcgttcgctccaagctgggctgtgtgcacgaaccccccgttcagcccgaccgctgcgccttatccggtaactatcgtcttgagtccaacccggtaagacacgacttatcgccactggcagcagccactggtaacaggattagcagagcgaggtatgtaggcggtgctacagagttcttgaagtggtggcctaactacggctacactagaagaacagtatttggtatctgcgctctgctgaagccagttaccttcggaaaaagagttggtagctcttgatccggcaaacaaaccaccgctggtagcggtggtttttttgtttgcaagcagcagattacgcgcagaaaaaaaggatctcaagaagatcctttgatcttttctacggggtctgacgctcagtggaacgaaaactcacgttaagggattttggtcatgagattatcaaaaaggatcttcacctagatccttttaaattaaaaatgaagttttaaatcaatctaaagtatatatgagtaaacttggtctgacagttaccaatgcttaatcagtgaggcacctatctcagcgatctgtctatttcgttcatccatagttgcctgactccccgtcgtgtagataactacgatacgggagggcttaccatctggccccagtgctgcaatgataccgcgagacccacgctcaccggctccagatttatcagcaataaaccagccagccggaagggccgagcgcagaagtggtcctgcaactttatccgcctccatccagtctattaattgttgccgggaagctagagtaagtagttcgccagttaatagtttgcgcaacgttgttgccattgctacaggcatcgtggtgtcacgctcgtcgtttggtatggcttcattcagctccggttcccaacgatcaaggcgagttacatgatcccccatgttgtgcaaaaaagcggttagctccttcggtcctccgatcgttgtcagaagtaagttggccgcagtgttatcactcatggttatggcagcactgcataattctcttactgtcatgccatccgtaagatgcttttctgtgactggtgagtactcaaccaagtcattctgagaatagtgtatgcggcgaccgagttgctcttgcccggcgtcaatacgggataataccgcgccacatagcagaactttaaaagtgctcatcattggaaaacgttcttcggggcgaaaactctcaaggatcttaccgctgttgagatccagttcgatgtaacccactcgtgcacccaactgatcttcagcatcttttactttcaccagcgtttctgggtgagcaaaaacaggaaggcaaaatgccgcaaaaaagggaataagggcgacacggaaatgttgaatactcatactcttcctttttcaattcagaagaactcgtcaagaaggcgatagaaggcgatgcgctgcgaatcgggagcggcgataccgtaaagcacgaggaagcggtcagcccattcgccgccaagctcttcagcaatatcacgggtagccaacgctatgtcctgatagcggtccgccacacccagccggccacagtcgatgaatccagaaaagcggccattttccaccatgatattcggcaagcaggcatcgccatgggtcacgacgagatcctcgccgtcgggcatgcgcgccttgagcctggcgaacagttcggctggcgcgagcccctgatgctcttcgtccagatcatcctgatcgacaagaccggcttccatccgagtacgtgctcgctcgatgcgatgtttcgcttggtggtcgaatgggcaggtagccggatcaagcgtatgcagccgccgcattgcatcagccatgatggatactttctcggcaggagcaaggtgggatgacaggagatcctgccccggcacttcgcccaatagcagccagtcccttcccgcttcagtgacaacgtcgagcacagctgcgcaaggaacgcccgtcgtggccagccacgatagccgcgctgcctcgtcctgcagttcattcagggcaccggacaggtcggtcttgacaaaaagaaccgggcgcccctgcgctgacagccggaacacggcggcatcagagcagccgattgtctgttgtgcccagtcatagccgaatagcctctccacccaagcggccggagaacctgcgtgcaatccatcttgttcaatcatgcgaaacgatcctcatcctgtctcttgatcagatcttgatcccctgcgccatcagatccttggcggcaagaaagccatccagtttactttgcagggcttcccaaccttaccagagggcgccccagctggcaattccggttcgcttgctgtccataaaaccgcccagtctagctatcgccatgtaagcccactgcaagctacctgctttctctttgcgcttgcgttttcccttgtccagatagcccagtagctgacattcatccggggtcagcaccgtttctgcggactggctttctacgtgttccgcttcctttagcagcccttgcgccctgaattttgttaaaattcgcgttaaatttttgttaaatcagctcattttttaaccaataggccgaaatcggcaaaatcccttataaatcaaaagaatagaccgagatagggttgagtgttgttccagtttggaacaagagtccactattaaagaacgtggactccaacgtcaaagggcgaaaaaccgtctatcagggcgatggcccactacgtgaaccatcaccctaatcaagttttttggggtcgaggtgccgtaaagcactaaatcggaaccctaaagggagcccccgatttagagcttgacggggaaagccggcgaacgtggcgagaaaggaagggaagaaagcgaaaggagcgggcgctagggcgctggcaagtgtagcggtcacgctgcgcgtaaccaccacacccgccgcgcttaatgcgccgctacagggcgcgtccattcgccattcaggctgcgcaactgttgggaagggcgatcggtgcgggcctcttcgctattacgccagctggcgaaagggggatgtgctgcaaggcgattaagttgggtaacgccagggttttcccagtcacgacgttgtaaaacgacggccagtgaattgtaatacgactcactatagggcgaattgggccctctagatgcatgctcgagcggccgccagtgtgatggatatctgcagaattcgcccttgcatttattttagaaatgataggatatatttaaggcgacatatggaagtgagcggctggcggctgttcaagaagatatcgcggtcgtgcccctctctagagataatgagcattgcatgtctaagttataaaaaattaccacatattttttttgtcacacttgtttgaagtgcagtttatctatctttatacatatatttaaactttactctacgaataatataatctatagtactacaataatatcagtgttttagagaatcatataaatgaacagttagacatggtctaaaggacaattgagtattttgacaacaggactctacagttttatctttttagtgtgcatgtgttctcctttttttttgcaaatagcttcacctatataatacttcatccattttattagtacatccatttagggtttagggttaatggtttttatagactaatttttttagtacatctattttattctattttagcctctaaattaagaaaactaaaactctattttagtttttttatttaataatttagatataaaatagaataaaataaagtgactaaaaattaaacaaataccctttaagaaattaaaaaaactaaggaaacatttttcttgtttcgagtagataatgccagcctgttaaacgccgtcgatcgacgagtctaacggacaccaaccagcgaaccagcagcgtcgcgtcgggccaagcgaagcagacggcacggcatctctgtcgctgcctctggacccctctcgagagttccgctccaccgttggacttgctccgctgtcggcatccagaaattgcgtggcggagcggcagacgtgagccggcacggcaggcggcctcctcctcctctcacggcaccggcagctacgggggattcctttcccaccgctccttcgctttcccttcctcgcccgccgtaataaatagacaccccctccacaccctctttccccaacctcgtgttgttcggagcgcacacacacacaaccagatctcccccaaatccacccgtcggcacctccgcttcaaggtacgccgctcgtcctccccccccccccctctctaccttctctagatcggcgttccggtccatggttagggcccggtagttctacttctgttcatgtttgtgttagatccgtgtttgtgttagatccgtgctgctagcgttcgtacacggatgcgacctgtacgtcagacacgttctgattgctaacttgccagtgtttctctttggggaatcctgggatggctctagccgttccgcagacgggatcgatctaggataggtatacatgttgatgtgggttttactgatgcatatacatgatggcatatgcagcatctattcatatgctctaaccttgagtacctatctattataataaacaagtatgttttataattattttgatcttgatatacttggatgatggcatatgcagcagctatatgtggatttttttagccctgccttcatacgctatttatttgcttggtactgtttcttttgtcgatgctcaccctgttgtttggtgttacttctgcagattgggacgacgaagcagccggtcagccggcgctccggccggccggccggccaagggcgaattccagcacactggcggccgttactagtggatccgagctcggtaccaagcttgatgcatagcttgagtattctatagtgtcacctaaatagcttggcgtaatcatggtcatagctgtttcctgtgtgaaattgttatccgctcacaattccacacaacatacgagccggaagcataaagtgtaaagcctggggtgcctaatgagtgagctaactcacattaattgcgttgcgctcactgcccgctttccagtcgggaaacctgtcgtgccagctgcattaatgaatcggccaacgcgcggggagaggcggtttgcgtattgggcgct

SEQ ID NO: 180 - DNA, 10980 bp, Artificial Sequence
  Plasmid construct expressing ZmPolQ
aaagggaacaaaagctggactagaggcccttaaggcctctgcagtgcagcgtgacccggtcgtgcccctctctagagataatgagcattgcatgtctaagttataaaaaattaccacatattttttttgtcacacttgtttgaagtgcagtttatctatctttatacatatatttaaactttactctacgaataatataatctatagtactacaataatatcagtgttttagagaatcatataaatgaacagttagacatggtctaaaggacaattgagtattttgacaacaggactctacagttttatctttttagtgtgcatgtgttctcctttttttttgcaaatagcttcacctatataatacttcatccattttattagtacatccatttagggtttagggttaatggtttttatagactaatttttttagtacatctattttattctattttagcctctaaattaagaaaactaaaactctattttagtttttttatttaataatttagatataaaatagaataaaataaagtgactaaaaattaaacaaataccctttaagaaattaaaaaaactaaggaaacatttttcttgtttcgagtagataatgccagcctgttaaacgccgtcgatcgacgagtctaacggacaccaaccagcgaaccagcagcgtcgcgtcgggccaagcgaagcagacggcacggcatctctgtcgctgcctctggacccctctcgagagttccgctccaccgttggacttgctccgctgtcggcatccagaaattgcgtggcggagcggcagacgtgagccggcacggcaggcggcctcctcctcctctcacggcaccggcagctacgggggattcctttcccaccgctccttcgctttcccttcctcgcccgccgtaataaatagacaccccctccacaccctctttccccaacctcgtgttgttcggagcgcacacacacacaaccagatctcccccaaatccacccgtcggcacctccgcttcaaggtacgccgctcgtcctccccccccccccctctctaccttctctagatcggcgttccggtccatggttagggcccggtagttctacttctgttcatgtttgtgttagatccgtgtttgtgttagatccgtgctgctagcgttcgtacacggatgcgacctgtacgtcagacacgttctgattgctaacttgccagtgtttctctttggggaatcctgggatggctctagccgttccgcagacgggatcgatctaggataggtatacatgttgatgtgggttttactgatgcatatacatgatggcatatgcagcatctattcatatgctctaaccttgagtacctatctattataataaacaagtatgttttataattattttgatcttgatatacttggatgatggcatatgcagcagctatatgtggatttttttagccctgccttcatacgctatttatttgcttggtactgtttcttttgtcgatgctcaccctgttgtttggtgttacttctgcagatatcgagaattcgagctcggtacatggcgtcgggctcgtctcgcccccaaatcgaccagttcttcccggccaagaagcggaggccctcgtcgcggaagggcgagtcgccgcgacccgggacgcagcatgagagccccggcggcgccaaggggtccctggaagggtacctcgtccgttcgccttgcaaccgtgccgtggcagcggcatcggtggtccccgtgggctcgcccaggggcggggacccgggcgccaggcgtagcctctcggccgcaatggatgtcgacgtcggttcctcggcttcggtggctgcggcggcaggtgacggggcagactttgatctcaggaggagcacggcggatttcttgtcccattcctgcagtgctatcctgcctttgaggggtgactgtgattacagcgagcagtgccagatgaagcagaagcggagtgcgtcccagtcattcttggttccttgtgacaacgactatgtcaagaagcagcgagttgcccattgtggtggctttgaagctctaaaggagttagatgataatgtagcttccatgaagcaatgcatcaatcaccatggtggctcagaggctgtggaggaatctgttgagggggaacatgtgagttgtgttgggttttcggccttgcaaagatgtagctttaccccaagtactgcacagataaaagttgggttttctctagcacctgtggaaaccctaaagtctgtatcgaggaattcccttacttcacctggtgaggagttctggaatgcagcaattgaactcgctgatgggatatctgcccaggctgataaggtccgtggaaggccagaatttgatgcagcagaagacaagtcatcttgtgcagtagcagcattctttaagactcttcctagatcaggaagggatgagcttgactgtcaaaacacagtaggcagcaatgatacacatcatatagagaaattgtcaaataaagttgaatcactggcagtaaactgtcagcatataattagctcacctttgcctgtgaagcagctagatttctttcatgaggatgatattaaagtttcaggttcaaaatttgaaacaaaaggcagctatgaaacttgtaatgcacaagcagaccgtgttccactgaaaggcagtggccgcctagaaaaggaaaatctcatggaccctgtggatgtgttgaagagaagtgctattaatttgcacactgattctgcagccatgagatgtcagggtgttttcaagtcaacaactgaagggaaggttcatccaactcaagaggctgaaagagattctaatcttattaggagagatctcaatcagccaacccacaatgaaaataaatcacttgctgcatattcaaataatcgcaagacttggatagattccaagagtaaagttgcttctcaggaagtggaagctagcacacctactagctccattcctctaaaggatcactcaaagatatcaagttggcttcctcctgacctttgtgctatatacatgaaaaaaggcatttcagagctgtacccttggcaggttgaatgtttacttgtagaaggtgtcttgggcaaaaggaatcttgtgtattgtgcatccacgagtgctggtaaaagttttgttgctgaagttctgatgttgaggcagatactgtcaactgggaatatggcaattcttgtccttccctatgtgtcaatatgcgctgaaaaggctgaacatcttgaacaacttcttgagccactgggtaggcatgtccgtagcttctacggaaaccaggggggaggctcacttcctaaagatacagcagttgctgtatgtaccatagagaaggcaaactctttggtaaacaagttgttggaggatggccgcctctctgaacttggtgtaattgtcatagatgaacttcatatggttggtgaccaacatagaggatatcttttagagctgatgttgacaaagcttcgatatgctgctggtgaagggactttacagtcatgtagcggagaagtttcaagttctagcagtgggaagattgcaagtcatgggttgcagataattggtatgagtgctactatgcccaacatcgctgcggtggctgattggcttcaagctgctctttatcaaactgactttcgaccagttccactggaggaattcataaaagttggtaatcaaatatttgataaagacatgaacgttgttcgtgtccttcccaaagtagctgaccatggtggcaaggatccagatcatattgttgaattgtgtaatgaggttgttcttcagggccattctgtgcttttgttttgctccagtcgtaaaggctgcgaatcaactgcaaggcatgttgccaagttcttgaaactaccctctgttggaacaactgatgttagttcggagttttcagatgctgcagctgctattgaggccttgaggaggtgccctgctggattggatccaatattgggagaaacccttccttttggtgttgcatatcatcatgctggtcttacggtcgaggagagggagattgtggaatcatgctaccgtaaaggccttgtccgtgttctgactgccacttcaactttagctgctggtgttaacttgcctgctagacgggttatattcaggcagcccaagataggtcgtgattttattgatgggactcgctatagacagatggctggtcgtgctggtcgaactggaatagacacaaaaggagaaagtatacttgtatgcaggcctgaagaggtcaagagagttacaggtattattagaagcaattgccctcccttggagtcctgcctctcagaagataaaaatggaatgactcatgcaattatggaggttgttgctggtgggattgttcaaactgcaaatgatattcatcgttatgtgcggtgtacgctgcttaattccacaagaccttttgatgatgtcgtgaagtcagctcaagactcccttcgttggttatgccataaaagctttcttgagtggaaccatgagaccaagatatactccgctactccccttggtagagctgcttttggaagttcactcaaccctgaggaatcattggttgttcttgatgatctttcgagggcaagagaaggctttgttctggcatctgatttacatttagtttacttggtcacacccataaatgtagaccttgaacctgattgggaattatattacgagaaattcatgcaactttcttctcttgagcagtcagtaggcaatcgggttggagtaattgaacccttcttgatgcacatggctcatggggcgtcgataccttttcgtgcaaggcctgagagaaacaccgggttaagtaacaagtctgcacaagctgctggaaatactcttgttagtgagcacacaatcagagtgtctaagcgcttttatgtggctttaatgttatcgaggcttgctcaggagattcctattgctgatgtttgtgagacatttaaggtcgccagaggtatgattcaggcactgcaggaaaatgctggcaggtttgcttcaatggtttctgcattttgtcaaaggcttggttggaatgatttagaaggccttgtttcgaaattccaaaatcgtgtctcttttggagttagggcagagattgcagaactgacatcaattccatttgtcaagggttcacgtgcaagggctttgtacaagtctggtctgcgtactcctgttgccattgctgaagcatctattcctgaaattgcaaaagctctttttgaatcttctgcttggtctgggcaaggtgattctggtttacgacgaatgcaatttggtgtagcaaaaaaaataaaaaatggagcccgcaaaattgtcctggaggaggcagaagccgccagagtagcagcattctcagctttcaagtcacttggtgtggaagttccccagttcactgcacctccactcgcagctattgaggaatatccaactcacgataccatagaccaagctaagttaaataagctagcttctggtacccattctagagatgataaaaatatgaatacttgctctgattatgctactccaagggcttctacatacagtctaagaaaggacacaagtcctgctccttccattcaaatgaaagagaatgcaggactatctaaaaatgtgcaaatcactagacagggagcatcatcatctttgtcaacagaaattgctgatggatctagtagagatgtggctgaaaaaggtcctgtccatgcatataacttcccagggggatttgattgttttcttgatcaatggtccacagctagtaattttttctttgatgttcattttatcaagagatcgatgaaaccatctttgaacctttttgaagtttttgggttggctgtctgttgggaaaaatctcccatatactactgcaacttcccaaaagatctagtcactactggcaacaataacatcaaggaaatgtggggtaattttcagagaagatgggaaaaaatagcggacattatgaaacaaaagagtgtccaaaaaatgacatggaatttaaagatccagatccaggcacttaaatcaccttatatttcttgccaacggcttgaaaggtttcatcttgaccataaaatgctggacaaagttgaagtgcttaacaactcatatatgttgttatcaccagtctctgtctacaatggattggatatatgtctgctggcgtgggttctatggccagatgaggaaagcagagcggttccaaatcttgagaagtttgtcaagaggcgacttcatagtcaagaagctgctgctgcaaatcgcgatggaagatggagaaatcagatgcacaaagcagcacacaatggctgctgtagacgtgctgcacagacacgggctttgtatactgttctgaagaaattacttactcaaaatctttctgttttggttgaaacaatcgaggccccattggttaatgttcttgctgatatggagctttggggaattggcgctgacatggatgcttgtctccgtgcgaggcatattataacaaaaaagctgaaggaactagagaaagaagcttacagattggcaggcaagaatttctctctaaatgctactgctgatatcgcagacattctatatacacacctaaaattgccagttccaaaaggctgtgagaaagggaagctgcatcctagcactgacaagcagtctttggaccacctaagggatcaacaccccattatcccattaattaaggaacacagaacattagcaaaactgttaaatggcacgttgtggtccatttgttcacgtgctcaattgtgcactcaatcacaaaggtacatcatacatggaaattggcttcagacgtcaactgccactggccgtttgtccatggaggagccaaatctgcagtgtgttgagcatgtggtggaattcgatacagggaaaagcgataaagattactcaagcatttcagttgatgatcatcataaaatcaatgcccgtgattttttcatacctaccaaggagaactggttattcataactgctgattactcacagattgagttgcgtttaatggctcacttttctaaagatcatatgttggttgaacttctaaagaaacctgatggtgatgtttttaccatgattgcttcaagatgggctgagaaagaagaggccttgatttcttccaaagagagagaaaacactaaaagattcatatatggcatcctttatggaatgggtgcaaactcccttgcagaacaacttcagtgcagcactgaggaagctgcacagaaaattcaaagctttaggagattttttcctggtgtttcctcatggttacatgaagttgtgttatcctgtcgccaaaaaggatttgttgagactttattaggccggcgacgtgttcttacaaaaataacggctggcaatagcaaagagaaagctaaagcacagaggcaagcagtaaattctatttgccagggttctgctgctgatattattaaggtggctatgattagagttcattcaataattactaacagaactagtgcagctgattccacagatgaagttacaaggaaattttcagaacttggtggccagtgtcaccttattttgcaggtgcatgatgagttggtattagaagttgatccgtgcatggtagcacaggctggaaggttgttacagatatgtatggaagaagcagcttcactattggtacctttgcgcacaaagataaaggtgggaaaaacttggggttcactagaaccattccatcctgagccttgttgacgcgtgtcgactcgaatttccccgatcgttcaaacatttggcaataaagtttcttaagattgaatcctgttgccggtcttgcgatgattatcatataatttctgttgaattacgttaagcatgtaataattaacatgtaatgcatgacgttatttatgagatgggtttttatgattagagtcccgcaattatacatttaatacgcgatagaaaacaaaatatagcgcgcaaactaggataaattatcgcgcgcggtgtcatctatgttactagatcgctcgacgcggccgccatggccagatcgtacccaattcgccctatagtgagtcgtattacaattcactggccgtcgttttacaacgtcgtgactgggaaaaccctggcgttacccaacttaatcgccttgcagcacatccccctttcgccagctggcgtaatagcgaagaggcccgcaccgatcgcccttcccaacagttgcgcagcctgaatggcgaatggaaattgtaagcgttaatattttgttaaaattcgcgttaaatttttgttaaatcagctcattttttaaccaataggccgaaatcggcaaaatcccttataaatcaaaagaatagaccgagatagggttgagtgttgttccagtttggaacaagagtccactattaaagaacgtggactccaacgtcaaagggcgaaaaaccgtctatcagggcgatggcccactacgtgaaccatcaccctaatcaagttttttggggtcgaggtgccgtaaagcactaaatcggaaccctaaagggagcccccgatttagagcttgacggggaaagccggcgaacgtggcgagaaaggaagggaagaaagcgaaaggagcgggcgctagggcgctggcaagtgtagcggtcacgctgcgcgtaaccaccacacccgccgcgcttaatgcgccgctacagggcgcgtcaggtggcacttttcggggaaatgtgcgcggaacccctatttgtttatttttctaaatacattcaaatatgtatccgctcatgagacaataaccctgataaatgcttcaataatattgaaaaaggaagagtatgagtattcaacatttccgtgtcgcccttattcccttttttgcggcattttgccttcctgtttttgctcacccagaaacgctggtgaaagtaaaagatgctgaagatcagttgggtgcacgagtgggttacatcgaactggatctcaacagcggtaagatccttgagagttttcgccccgaagaacgttttccaatgatgagcacttttaaagttctgctatgtggcgcggtattatcccgtattgacgccgggcaagagcaactcggtcgccgcatacactattctcagaatgacttggttgagtactcaccagtcacagaaaagcatcttacggatggcatgacagtaagagaattatgcagtgctgccataaccatgagtgataacactgcggccaacttacttctgacaacgatcggaggaccgaaggagctaaccgcttttttgcacaacatgggggatcatgtaactcgccttgatcgttgggaaccggagctgaatgaagccataccaaacgacgagcgtgacaccacgatgcctgtagcaatggcaacaacgttgcgcaaactattaactggcgaactacttactctagcttcccggcaacaattaatagactggatggaggcggataaagttgcaggaccacttctgcgctcggcccttccggctggctggtttattgctgataaatctggagccggtgagcgtgggtctcgcggtatcattgcagcactggggccagatggtaagccctcccgtatcgtagttatctacacgacggggagtcaggcaactatggatgaacgaaatagacagatcgctgagataggtgcctcactgattaagcattggtaactgtcagaccaagtttactcatatatactttagattgatttaaaacttcatttttaatttaaaaggatctaggtgaagatcctttttgataatctcatgaccaaaatcccttaacgtgagttttcgttccactgagcgtcagaccccgtagaaaagatcaaaggatcttcttgagatcctttttttctgcgcgtaatctgctgcttgcaaacaaaaaaaccaccgctaccagcggtggtttgtttgccggatcaagagctaccaactctttttccgaaggtaactggcttcagcagagcgcagataccaaatactgtccttctagtgtagccgtagttaggccaccacttcaagaactctgtagcaccgcctacatacctcgctctgctaatcctgttaccagtggctgctgccagtggcgataagtcgtgtcttaccgggttggactcaagacgatagttaccggataaggcgcagcggtcgggctgaacggggggttcgtgcacacagcccagcttggagcgaacgacctacaccgaactgagatacctacagcgtgagctatgagaaagcgccacgcttcccgaagggagaaaggcggacaggtatccggtaagcggcagggtcggaacaggagagcgcacgagggagcttccagggggaaacgcctggtatctttatagtcctgtcgggtttcgccacctctgacttgagcgtcgatttttgtgatgctcgtcaggggggcggagcctatggaaaaacgccagcaacgcggcctttttacggttcctggccttttgctggccttttgctcacatgttctttcctgcgttatcccctgattctgtggataaccgtattaccgcctttgagtgagctgataccgctcgccgcagccgaacgaccgagcgcagcgagtcagtgagcgaggaagcggaagagcgcccaatacgcaaaccgcctctccccgcgcgttggccgattcattaatgcagctggcacgacaggtttcccgactggaaagcgggcagtgagcgcaacgcaattaatgtgagttagctcactcattaggcaccccaggctttacactttatgcttccggctcgtatgttgtgtggaattgtgagcggataacaatttcacacaggaaacagctatgaccatgattacgccaagctcgaaattaaccctcact

SEQ ID NO: 181 - DNA, 7661 bp, Artificial Sequence
  Vector encoding ZmPARP1
aaagggaacaaaagctggactagaggcccttaaggcctctgcagtgcagcgtgacccggtcgtgcccctctctagagataatgagcattgcatgtctaagttataaaaaattaccacatattttttttgtcacacttgtttgaagtgcagtttatctatctttatacatatatttaaactttactctacgaataatataatctatagtactacaataatatcagtgttttagagaatcatataaatgaacagttagacatggtctaaaggacaattgagtattttgacaacaggactctacagttttatctttttagtgtgcatgtgttctcctttttttttgcaaatagcttcacctatataatacttcatccattttattagtacatccatttagggtttagggttaatggtttttatagactaatttttttagtacatctattttattctattttagcctctaaattaagaaaactaaaactctattttagtttttttatttaataatttagatataaaatagaataaaataaagtgactaaaaattaaacaaataccctttaagaaattaaaaaaactaaggaaacatttttcttgtttcgagtagataatgccagcctgttaaacgccgtcgatcgacgagtctaacggacaccaaccagcgaaccagcagcgtcgcgtcgggccaagcgaagcagacggcacggcatctctgtcgctgcctctggacccctctcgagagttccgctccaccgttggacttgctccgctgtcggcatccagaaattgcgtggcggagcggcagacgtgagccggcacggcaggcggcctcctcctcctctcacggcaccggcagctacgggggattcctttcccaccgctccttcgctttcccttcctcgcccgccgtaataaatagacaccccctccacaccctctttccccaacctcgtgttgttcggagcgcacacacacacaaccagatctcccccaaatccacccgtcggcacctccgcttcaaggtacgccgctcgtcctccccccccccccctctctaccttctctagatcggcgttccggtccatggttagggcccggtagttctacttctgttcatgtttgtgttagatccgtgtttgtgttagatccgtgctgctagcgttcgtacacggatgcgacctgtacgtcagacacgttctgattgctaacttgccagtgtttctctttggggaatcctgggatggctctagccgttccgcagacgggatcgatctaggataggtatacatgttgatgtgggttttactgatgcatatacatgatggcatatgcagcatctattcatatgctctaaccttgagtacctatctattataataaacaagtatgttttataattattttgatcttgatatacttggatgatggcatatgcagcagctatatgtggatttttttagccctgccttcatacgctatttatttgcttggtactgtttcttttgtcgatgctcaccctgttgtttggtgttacttctgcagatatcgagatggactacaaagacgatgacgacaaggcggcgccgccaaaggcgtggaaggcggagtatgccaagtctgggcgggcctcgtgcaagtcatgccggtcccctatcgccaaggaccagctccgtcttggcaagatggttcaggcgtcacagttcgacggcttcatgccgatgtggaaccatgccaggtgcatcttcagcaagaagaaccagataaaatccgttgacgatgttgaagggatagatgcacttagatgggatgatcaagagaagatacgaaactacgttgggagtgcctcagctggtacaagttctacagctgctcctcctgagaaatgtacaattgagattgctccatctgcccgtacttcatgtagacgatgcagtgaaaagattacaaaaggatcggtccgtctttcagctaagcttgagagtgaaggtcccaagggtataccatggtatcatgccaactgtttctttgaggtatccccgtctgcaactgttgagaagttctcaggctgggatactttgtccgatgaggataagagaaccatgctcgatcttgttaaaaaagatgttggcaacaatgaacaaaataagggttccaagcgcaagaaaagtgaaaatgatattgatagctacaaatccgccaggttagatgaaagtacatctgaaggtacagtgcgaaacaaagggcaacttgtagacccacgtggttccaatactagttcagctgatatccaactaaagcttaaggagcaaagtgacacactttggaagttaaaggatggacttaagactcatgtatcggctgctgaattaagggatatgcttgaggctaatgggcaggatacatcaggaccagaaaggcacctattggatcgctgtgcggatggaatgctatttggagcgctgggtccttgcccagtctgtgctaatggcatgtactattataatggtcagtaccaatgcagtggtaatgtgtcagagtggtccaagtgtacatactctgccacagaacctgtccgcgttaagaagaagtggcaaattccacatggaacaaagaatgattaccttatgaagtggttcaaatctcaaaaggttaagaaaccagagagggttcttccaccaatgtcacctgagaaatctggaagtaaagcaactcagagaacatcattgctgtcttctaaagggttggataaattaaggttttctgttgtaggacaatcaaaagaagcagcaaatgagtggattgagaagctcaaacttgctggtgccaacttctatgccagggttgtcaaagatattgattgtttaattgcatgtggtgagctcgacaatgaaaatgctgaagtcaggaaagcaaggaggctgaagataccaattgtaagggagggttacattggagaatgtgttaaaaagaacaaaatgctgccatttgatttgtataaactagagaatgccttagagtcctcaaaaggcagtactgtcactgttaaagttaagggccgaagtgctgttcatgagtcctctggtttgcaagatactgctcacattcttgaagatgggaaaagcatatacaatgcaaccttaaacatgtctgacctggcactaggtgtgaacagctactatgtactccagatcattgaacaggatgatgggtctgagtgctacgtatttcgtaagtggggacgggttgggagtgagaaaattggagggcaaaaactggaggagatgtcaaaaactgaggcaatcaaggaattcaaaagattatttcttgagaagactggaaactcatgggaagcttgggaatgtaaaaccaattttcggaagcagcctgggagattttacccacttgatgttgattatggtgttaagaaagcaccaaaacggaaagatatcagtgaaatgaaaagttctcttgctcctcaattgctagaactcatgaagatgcttttcaatgtggagacatatagagctgctatgatggaatttgaaattaatatgtcagaaatgcctcttgggaagctaagcaaggaaaatattgagaaaggatttgaagcattaactgagatacagaatttattgaaggacaccgctgatcaagcactggctgttagagaaagcttaattgttgctgcgagcaatcgctttttcactcttatcccttctattcatcctcatattatacgggatgaggatgatttgatgatcaaagcgaaaatgcttgaagctctgcaggatattgaaattgcttcaaagatagttggcttcgatagcgacagtgatgaatctcttgatgataaatatatgaaacttcactgtgacatcaccccgctggctcacgatagtgaagattacaagttaattgagcagtatctcctcaacacacatgctcctactcacaaggactggtcgctggaactggaggaagttttttcacttgatcgagatggagaacttaataagtactcaagatataaaaataatctgcataacaagatgctattatggcacggttcaaggttgacgaattttgtgggaattcttagtcaagggctaagaattgcacctcctgaggcacctgttactggctatatgttcggcaaaggcctctactttgcagatctagtaagcaagagcgcacaatactgttatgtggataggaataatcctgtaggtttgatgcttctttctgaggttgctttaggagacatgtatgaactaaagaaagccacgtccatggacaaacctccaagagggaagcattcgaccaagggattaggcaaaaccgtgccactggagtcagagtttgtgaagtggagggatgatgtcgtagttccctgcggcaagccggtgccatcatcaattaggagctctgaactcatgtacaatgagtacatcgtctacaacacatcccaggtgaagatgcagttcttgctgaaggtgcgtttccatcacaagaggtagcgcgtgtcgactcgaatttccccgatcgttcaaacatttggcaataaagtttcttaagattgaatcctgttgccggtcttgcgatgattatcatataatttctgttgaattacgttaagcatgtaataattaacatgtaatgcatgacgttatttatgagatgggtttttatgattagagtcccgcaattatacatttaatacgcgatagaaaacaaaatatagcgcgcaaactaggataaattatcgcgcgcggtgtcatctatgttactagatcgctcgacgcggccgccatggccagatcgtacccaattcgccctatagtgagtcgtattacaattcactggccgtcgttttacaacgtcgtgactgggaaaaccctggcgttacccaacttaatcgccttgcagcacatccccctttcgccagctggcgtaatagcgaagaggcccgcaccgatcgcccttcccaacagttgcgcagcctgaatggcgaatggaaattgtaagcgttaatattttgttaaaattcgcgttaaatttttgttaaatcagctcattttttaaccaataggccgaaatcggcaaaatcccttataaatcaaaagaatagaccgagatagggttgagtgttgttccagtttggaacaagagtccactattaaagaacgtggactccaacgtcaaagggcgaaaaaccgtctatcagggcgatggcccactacgtgaaccatcaccctaatcaagttttttggggtcgaggtgccgtaaagcactaaatcggaaccctaaagggagcccccgatttagagcttgacggggaaagccggcgaacgtggcgagaaaggaagggaagaaagcgaaaggagcgggcgctagggcgctggcaagtgtagcggtcacgctgcgcgtaaccaccacacccgccgcgcttaatgcgccgctacagggcgcgtcaggtggcacttttcggggaaatgtgcgcggaacccctatttgtttatttttctaaatacattcaaatatgtatccgctcatgagacaataaccctgataaatgcttcaataatattgaaaaaggaagagtatgagtattcaacatttccgtgtcgcccttattcccttttttgcggcattttgccttcctgtttttgctcacccagaaacgctggtgaaagtaaaagatgctgaagatcagttgggtgcacgagtgggttacatcgaactggatctcaacagcggtaagatccttgagagttttcgccccgaagaacgttttccaatgatgagcacttttaaagttctgctatgtggcgcggtattatcccgtattgacgccgggcaagagcaactcggtcgccgcatacactattctcagaatgacttggttgagtactcaccagtcacagaaaagcatcttacggatggcatgacagtaagagaattatgcagtgctgccataaccatgagtgataacactgcggccaacttacttctgacaacgatcggaggaccgaaggagctaaccgcttttttgcacaacatgggggatcatgtaactcgccttgatcgttgggaaccggagctgaatgaagccataccaaacgacgagcgtgacaccacgatgcctgtagcaatggcaacaacgttgcgcaaactattaactggcgaactacttactctagcttcccggcaacaattaatagactggatggaggcggataaagttgcaggaccacttctgcgctcggcccttccggctggctggtttattgctgataaatctggagccggtgagcgtgggtctcgcggtatcattgcagcactggggccagatggtaagccctcccgtatcgtagttatctacacgacggggagtcaggcaactatggatgaacgaaatagacagatcgctgagataggtgcctcactgattaagcattggtaactgtcagaccaagtttactcatatatactttagattgatttaaaacttcatttttaatttaaaaggatctaggtgaagatcctttttgataatctcatgaccaaaatcccttaacgtgagttttcgttccactgagcgtcagaccccgtagaaaagatcaaaggatcttcttgagatcctttttttctgcgcgtaatctgctgcttgcaaacaaaaaaaccaccgctaccagcggtggtttgtttgccggatcaagagctaccaactctttttccgaaggtaactggcttcagcagagcgcagataccaaatactgtccttctagtgtagccgtagttaggccaccacttcaagaactctgtagcaccgcctacatacctcgctctgctaatcctgttaccagtggctgctgccagtggcgataagtcgtgtcttaccgggttggactcaagacgatagttaccggataaggcgcagcggtcgggctgaacggggggttcgtgcacacagcccagcttggagcgaacgacctacaccgaactgagatacctacagcgtgagctatgagaaagcgccacgcttcccgaagggagaaaggcggacaggtatccggtaagcggcagggtcggaacaggagagcgcacgagggagcttccagggggaaacgcctggtatctttatagtcctgtcgggtttcgccacctctgacttgagcgtcgatttttgtgatgctcgtcaggggggcggagcctatggaaaaacgccagcaacgcggcctttttacggttcctggccttttgctggccttttgctcacatgttctttcctgcgttatcccctgattctgtggataaccgtattaccgcctttgagtgagctgataccgctcgccgcagccgaacgaccgagcgcagcgagtcagtgagcgaggaagcggaagagcgcccaatacgcaaaccgcctctccccgcgcgttggccgattcattaatgcagctggcacgacaggtttcccgactggaaagcgggcagtgagcgcaacgcaattaatgtgagttagctcactcattaggcaccccaggctttacactttatgcttccggctcgtatgttgtgtggaattgtgagcggataacaatttcacacaggaaacagctatgaccatgattacgccaagctcgaaattaaccctcact

SEQ ID NO: 182 - DNA, 6839 bp, Artificial Sequence
  Vector encoding ZmMre11
aaagggaacaaaagctggactagaggcccttaaggcctctgcagtgcagcgtgacccggtcgtgcccctctctagagataatgagcattgcatgtctaagttataaaaaattaccacatattttttttgtcacacttgtttgaagtgcagtttatctatctttatacatatatttaaactttactctacgaataatataatctatagtactacaataatatcagtgttttagagaatcatataaatgaacagttagacatggtctaaaggacaattgagtattttgacaacaggactctacagttttatctttttagtgtgcatgtgttctcctttttttttgcaaatagcttcacctatataatacttcatccattttattagtacatccatttagggtttagggttaatggtttttatagactaatttttttagtacatctattttattctattttagcctctaaattaagaaaactaaaactctattttagtttttttatttaataatttagatataaaatagaataaaataaagtgactaaaaattaaacaaataccctttaagaaattaaaaaaactaaggaaacatttttcttgtttcgagtagataatgccagcctgttaaacgccgtcgatcgacgagtctaacggacaccaaccagcgaaccagcagcgtcgcgtcgggccaagcgaagcagacggcacggcatctctgtcgctgcctctggacccctctcgagagttccgctccaccgttggacttgctccgctgtcggcatccagaaattgcgtggcggagcggcagacgtgagccggcacggcaggcggcctcctcctcctctcacggcaccggcagctacgggggattcctttcccaccgctccttcgctttcccttcctcgcccgccgtaataaatagacaccccctccacaccctctttccccaacctcgtgttgttcggagcgcacacacacacaaccagatctcccccaaatccacccgtcggcacctccgcttcaaggtacgccgctcgtcctccccccccccccctctctaccttctctagatcggcgttccggtccatggttagggcccggtagttctacttctgttcatgtttgtgttagatccgtgtttgtgttagatccgtgctgctagcgttcgtacacggatgcgacctgtacgtcagacacgttctgattgctaacttgccagtgtttctctttggggaatcctgggatggctctagccgttccgcagacgggatcgatctaggataggtatacatgttgatgtgggttttactgatgcatatacatgatggcatatgcagcatctattcatatgctctaaccttgagtacctatctattataataaacaagtatgttttataattattttgatcttgatatacttggatgatggcatatgcagcagctatatgtggatttttttagccctgccttcatacgctatttatttgcttggtactgtttcttttgtcgatgctcaccctgttgtttggtgttacttctgcagatatcgagatgtctgaaccagcacaacctagtggaggggaaggcgatgtcaacacgctccgaatacttgtagcaaccgactgccatctaggctacatggagaaagatgagatacgtaggtttgattcctttcaagcatttgaggagatttgcgcattggcagataaaaataaggtggattttatacttctcggtggtgatctattccatgagaacaagccgtcacgctcaaccctggtaaaaacgattgagattctacggcgctactgcctaaatgatcaacctgtgaagttccaggttgtcagtgatcagacagttaactttccaaacaggtttggtaaggtaaattatgaagacccaaactttaacgttggtctgcctgtgttcaccattcatggaaatcatgatgaccctgctggagtggataatctctctgctatcgatattctttcggcttgcaatcttgtaaattattttggaaagatggaccttggtggctctggcgttggtcagatagcagtttatcctgtacttgtaaaaaagggcatgacttcagttgcactgtatggtcttggaaacattagagatgaacgactaaatagaatgtttcagacgcctcattcagtacagtggatgcgacctggaactcaagatggggagtcagcgtctgactggttcaatatattggtacttcatcagaataggataaagacaaaccctaaaagtgccatcaatgagcatttcttaccacgtttcctggattttattgtatggggccatgagcatgaatgtcttattgatcctcaggaggtccctggaatgggtttccacatcacacaaccaggttcatcagtcgcgacgtccctgattgatggtgaagcaaaaccaaagcatgttcttttgttagaaatcaagggaaatcagtacaggccaaccaaaatacctctgagatctgtcagaccttttgaatatgctgaggttgtgttgaaagatgaagcagatgttaactcaaatgatcaggactctgtgcttgaacatttggataaaattgtaagaaatctgattgagaagagtagccaaccaactgccagcagatcagagcccaaacttccattagttagaatcaaggtagattactctgggttttcaacaataaacccacaacgttttggtcagaagtatgttggaaaggtcgcaaaccctcaagatattctcatcttctcaaaatcagcaaagaagcgccagactacaggagatcacattgatgattctgagaaacttcgtcctgaggaactaaaccaacaaacaatcgaagctctggtcgcagagagtaacttgaaaatggagattcttccggttgatgatttggacattgcgttgcatgattttgtgaacaaggatgacaagatggcattttattcatgtttgcagagaaaccttgaagaaaccaggaataagttgagttctgaagcagataaatccaaatttgaggaagaagatataatagtcaaagttggcgagtgcatgcaggaacgcgttaaggaaaggtctctgcactctaaggacggcacacgtttgacaacaggctctcacaacttggatactggaggtaaatcttttacagctcaaagcaaccagaactccttcagtgatgatgaagacaccagggagatgcttcttggtgcaagatcaactgatgttggacgaaaatcatctggatttactagaccctccaaagatactgctgatgttgctaaacgtggtacttccaaaagaggcaggggaagaggcaccagttcaatgaagcagaccactcttagtttcagccagtcaaggtcagctaccgttattcgtagtgaggatgtggcttcctctgaggaggaagcagatgcaaatgaagttgttgaaaattcagaagaggagagtgcgcaacaagttggacgtaaaagagcagctcctaggggtaggggtagaggtagaggcggaggttccactgcaaagagggggcgaaaaacagatattgcttccatgcaaaatatgatgagcaaagatgacgatgattcagaagatgaaccgccaaagaaaactcctcgggtcaccaggaactatggcgctgtcaggaggagagactacaaagacgatgacgacaagtgacgcgtgtcgactcgaatttccccgatcgttcaaacatttggcaataaagtttcttaagattgaatcctgttgccggtcttgcgatgattatcatataatttctgttgaattacgttaagcatgtaataattaacatgtaatgcatgacgttatttatgagatgggtttttatgattagagtcccgcaattatacatttaatacgcgatagaaaacaaaatatagcgcgcaaactaggataaattatcgcgcgcggtgtcatctatgttactagatcgctcgacgcggccgccatggccagatcgtacccaattcgccctatagtgagtcgtattacaattcactggccgtcgttttacaacgtcgtgactgggaaaaccctggcgttacccaacttaatcgccttgcagcacatccccctttcgccagctggcgtaatagcgaagaggcccgcaccgatcgcccttcccaacagttgcgcagcctgaatggcgaatggaaattgtaagcgttaatattttgttaaaattcgcgttaaatttttgttaaatcagctcattttttaaccaataggccgaaatcggcaaaatcccttataaatcaaaagaatagaccgagatagggttgagtgttgttccagtttggaacaagagtccactattaaagaacgtggactccaacgtcaaagggcgaaaaaccgtctatcagggcgatggcccactacgtgaaccatcaccctaatcaagttttttggggtcgaggtgccgtaaagcactaaatcggaaccctaaagggagcccccgatttagagcttgacggggaaagccggcgaacgtggcgagaaaggaagggaagaaagcgaaaggagcgggcgctagggcgctggcaagtgtagcggtcacgctgcgcgtaaccaccacacccgccgcgcttaatgcgccgctacagggcgcgtcaggtggcacttttcggggaaatgtgcgcggaacccctatttgtttatttttctaaatacattcaaatatgtatccgctcatgagacaataaccctgataaatgcttcaataatattgaaaaaggaagagtatgagtattcaacatttccgtgtcgcccttattcccttttttgcggcattttgccttcctgtttttgctcacccagaaacgctggtgaaagtaaaagatgctgaagatcagttgggtgcacgagtgggttacatcgaactggatctcaacagcggtaagatccttgagagttttcgccccgaagaacgttttccaatgatgagcacttttaaagttctgctatgtggcgcggtattatcccgtattgacgccgggcaagagcaactcggtcgccgcatacactattctcagaatgacttggttgagtactcaccagtcacagaaaagcatcttacggatggcatgacagtaagagaattatgcagtgctgccataaccatgagtgataacactgcggccaacttacttctgacaacgatcggaggaccgaaggagctaaccgcttttttgcacaacatgggggatcatgtaactcgccttgatcgttgggaaccggagctgaatgaagccataccaaacgacgagcgtgacaccacgatgcctgtagcaatggcaacaacgttgcgcaaactattaactggcgaactacttactctagcttcccggcaacaattaatagactggatggaggcggataaagttgcaggaccacttctgcgctcggcccttccggctggctggtttattgctgataaatctggagccggtgagcgtgggtctcgcggtatcattgcagcactggggccagatggtaagccctcccgtatcgtagttatctacacgacggggagtcaggcaactatggatgaacgaaatagacagatcgctgagataggtgcctcactgattaagcattggtaactgtcagaccaagtttactcatatatactttagattgatttaaaacttcatttttaatttaaaaggatctaggtgaagatcctttttgataatctcatgaccaaaatcccttaacgtgagttttcgttccactgagcgtcagaccccgtagaaaagatcaaaggatcttcttgagatcctttttttctgcgcgtaatctgctgcttgcaaacaaaaaaaccaccgctaccagcggtggtttgtttgccggatcaagagctaccaactctttttccgaaggtaactggcttcagcagagcgcagataccaaatactgtccttctagtgtagccgtagttaggccaccacttcaagaactctgtagcaccgcctacatacctcgctctgctaatcctgttaccagtggctgctgccagtggcgataagtcgtgtcttaccgggttggactcaagacgatagttaccggataaggcgcagcggtcgggctgaacggggggttcgtgcacacagcccagcttggagcgaacgacctacaccgaactgagatacctacagcgtgagctatgagaaagcgccacgcttcccgaagggagaaaggcggacaggtatccggtaagcggcagggtcggaacaggagagcgcacgagggagcttccagggggaaacgcctggtatctttatagtcctgtcgggtttcgccacctctgacttgagcgtcgatttttgtgatgctcgtcaggggggcggagcctatggaaaaacgccagcaacgcggcctttttacggttcctggccttttgctggccttttgctcacatgttctttcctgcgttatcccctgattctgtggataaccgtattaccgcctttgagtgagctgataccgctcgccgcagccgaacgaccgagcgcagcgagtcagtgagcgaggaagcggaagagcgcccaatacgcaaaccgcctctccccgcgcgttggccgattcattaatgcagctggcacgacaggtttcccgactggaaagcgggcagtgagcgcaacgcaattaatgtgagttagctcactcattaggcaccccaggctttacactttatgcttccggctcgtatgttgtgtggaattgtgagcggataacaatttcacacaggaaacagctatgaccatgattacgccaagctcgaaattaaccctcact

SEQ ID NO: 183 - DNA, 5503 bp, Artificial Sequence
  Vector encoding ZmRPA70C silencing construct
aaagggaacaaaagctggactagaggcccttaaggcctctgcagtgcagcgtgacccggtcgtgcccctctctagagataatgagcattgcatgtctaagttataaaaaattaccacatattttttttgtcacacttgtttgaagtgcagtttatctatctttatacatatatttaaactttactctacgaataatataatctatagtactacaataatatcagtgttttagagaatcatataaatgaacagttagacatggtctaaaggacaattgagtattttgacaacaggactctacagttttatctttttagtgtgcatgtgttctcctttttttttgcaaatagcttcacctatataatacttcatccattttattagtacatccatttagggtttagggttaatggtttttatagactaatttttttagtacatctattttattctattttagcctctaaattaagaaaactaaaactctattttagtttttttatttaataatttagatataaaatagaataaaataaagtgactaaaaattaaacaaataccctttaagaaattaaaaaaactaaggaaacatttttcttgtttcgagtagataatgccagcctgttaaacgccgtcgatcgacgagtctaacggacaccaaccagcgaaccagcagcgtcgcgtcgggccaagcgaagcagacggcacggcatctctgtcgctgcctctggacccctctcgagagttccgctccaccgttggacttgctccgctgtcggcatccagaaattgcgtggcggagcggcagacgtgagccggcacggcaggcggcctcctcctcctctcacggcaccggcagctacgggggattcctttcccaccgctccttcgctttcccttcctcgcccgccgtaataaatagacaccccctccacaccctctttccccaacctcgtgttgttcggagcgcacacacacacaaccagatctcccccaaatccacccgtcggcacctccgcttcaaggtacgccgctcgtcctccccccccccccctctctaccttctctagatcggcgttccggtccatggttagggcccggtagttctacttctgttcatgtttgtgttagatccgtgtttgtgttagatccgtgctgctagcgttcgtacacggatgcgacctgtacgtcagacacgttctgattgctaacttgccagtgtttctctttggggaatcctgggatggctctagccgttccgcagacgggatcgatctaggataggtatacatgttgatgtgggttttactgatgcatatacatgatggcatatgcagcatctattcatatgctctaaccttgagtacctatctattataataaacaagtatgttttataattattttgatcttgatatacttggatgatggcatatgcagcagctatatgtggatttttttagccctgccttcatacgctatttatttgcttggtactgtttcttttgtcgatgctcaccctgttgtttggtgttacttctgcagatatcgagaattcgagctcggtacccgggtcgggtgtcacttatggtacaacttcagcgcataatacaatgaatgcgggcatgacacagtcaaacttgcagcagcgttcactgaactctcaccagaaccaaaggtttgcagttccttccatggctggtggcagtggtgctcctgggaatacatatggacaacctgcacagtcgttttatcagcaaccgcctccagggcatatgaatagaactcctgtgtctaagaacgatgcatatcgtcttgtcccattggctcaattgaacccttatctagataaatggacaatcaaggtcagggtagtggccctgcaggtacctgaaataaaactctaaatgtaagttgtaatggagcaaagattaaaagagctaaaagtgatgttcaaatggtataagaggatacagtgacacaactgttaagaacacagttaatgaccacataatgaagcagtgtactgaaagaaagtagctgagggtacttaccaggccactaccctgaccttgattgtccatttatctagataagggttcaattgagccaatgggacaagacgatatgcatcgttcttagacacaggagttctattcatatgccctggaggcggttgctgataaaacgactgtgcaggttgtccatatgtattcccaggagcaccactgccaccagccatggaaggaactgcaaacctttggttctggtgagagttcagtgaacgctgctgcaagtttgactgtgtcatgcccgcattcattgtattatgcgctgaagttgtaccataagtgacacccgacgcgtgtcgactcgaatttccccgatcgttcaaacatttggcaataaagtttcttaagattgaatcctgttgccggtcttgcgatgattatcatataatttctgttgaattacgttaagcatgtaataattaacatgtaatgcatgacgttatttatgagatgggtttttatgattagagtcccgcaattatacatttaatacgcgatagaaaacaaaatatagcgcgcaaactaggataaattatcgcgcgcggtgtcatctatgttactagatcgctcgacgcggccgccatggccagatcgtacccaattcgccctatagtgagtcgtattacaattcactggccgtcgttttacaacgtcgtgactgggaaaaccctggcgttacccaacttaatcgccttgcagcacatccccctttcgccagctggcgtaatagcgaagaggcccgcaccgatcgcccttcccaacagttgcgcagcctgaatggcgaatggaaattgtaagcgttaatattttgttaaaattcgcgttaaatttttgttaaatcagctcattttttaaccaataggccgaaatcggcaaaatcccttataaatcaaaagaatagaccgagatagggttgagtgttgttccagtttggaacaagagtccactattaaagaacgtggactccaacgtcaaagggcgaaaaaccgtctatcagggcgatggcccactacgtgaaccatcaccctaatcaagttttttggggtcgaggtgccgtaaagcactaaatcggaaccctaaagggagcccccgatttagagcttgacggggaaagccggcgaacgtggcgagaaaggaagggaagaaagcgaaaggagcgggcgctagggcgctggcaagtgtagcggtcacgctgcgcgtaaccaccacacccgccgcgcttaatgcgccgctacagggcgcgtcaggtggcacttttcggggaaatgtgcgcggaacccctatttgtttatttttctaaatacattcaaatatgtatccgctcatgagacaataaccctgataaatgcttcaataatattgaaaaaggaagagtatgagtattcaacatttccgtgtcgcccttattcccttttttgcggcattttgccttcctgtttttgctcacccagaaacgctggtgaaagtaaaagatgctgaagatcagttgggtgcacgagtgggttacatcgaactggatctcaacagcggtaagatccttgagagttttcgccccgaagaacgttttccaatgatgagcacttttaaagttctgctatgtggcgcggtattatcccgtattgacgccgggcaagagcaactcggtcgccgcatacactattctcagaatgacttggttgagtactcaccagtcacagaaaagcatcttacggatggcatgacagtaagagaattatgcagtgctgccataaccatgagtgataacactgcggccaacttacttctgacaacgatcggaggaccgaaggagctaaccgcttttttgcacaacatgggggatcatgtaactcgccttgatcgttgggaaccggagctgaatgaagccataccaaacgacgagcgtgacaccacgatgcctgtagcaatggcaacaacgttgcgcaaactattaactggcgaactacttactctagcttcccggcaacaattaatagactggatggaggcggataaagttgcaggaccacttctgcgctcggcccttccggctggctggtttattgctgataaatctggagccggtgagcgtgggtctcgcggtatcattgcagcactggggccagatggtaagccctcccgtatcgtagttatctacacgacggggagtcaggcaactatggatgaacgaaatagacagatcgctgagataggtgcctcactgattaagcattggtaactgtcagaccaagtttactcatatatactttagattgatttaaaacttcatttttaatttaaaaggatctaggtgaagatcctttttgataatctcatgaccaaaatcccttaacgtgagttttcgttccactgagcgtcagaccccgtagaaaagatcaaaggatcttcttgagatcctttttttctgcgcgtaatctgctgcttgcaaacaaaaaaaccaccgctaccagcggtggtttgtttgccggatcaagagctaccaactctttttccgaaggtaactggcttcagcagagcgcagataccaaatactgtccttctagtgtagccgtagttaggccaccacttcaagaactctgtagcaccgcctacatacctcgctctgctaatcctgttaccagtggctgctgccagtggcgataagtcgtgtcttaccgggttggactcaagacgatagttaccggataaggcgcagcggtcgggctgaacggggggttcgtgcacacagcccagcttggagcgaacgacctacaccgaactgagatacctacagcgtgagctatgagaaagcgccacgcttcccgaagggagaaaggcggacaggtatccggtaagcggcagggtcggaacaggagagcgcacgagggagcttccagggggaaacgcctggtatctttatagtcctgtcgggtttcgccacctctgacttgagcgtcgatttttgtgatgctcgtcaggggggcggagcctatggaaaaacgccagcaacgcggcctttttacggttcctggccttttgctggccttttgctcacatgttctttcctgcgttatcccctgattctgtggataaccgtattaccgcctttgagtgagctgataccgctcgccgcagccgaacgaccgagcgcagcgagtcagtgagcgaggaagcggaagagcgcccaatacgcaaaccgcctctccccgcgcgttggccgattcattaatgcagctggcacgacaggtttcccgactggaaagcgggcagtgagcgcaacgcaattaatgtgagttagctcactcattaggcaccccaggctttacactttatgcttccggctcgtatgttgtgtggaattgtgagcggataacaatttcacacaggaaacagctatgaccatgattacgccaagctcgaaattaaccctcact

SEQ ID NO: 184 - DNA, 788 bp, Artificial Sequence
  ZmRPA70C silencing construct
tcgggtgtcacttatggtacaacttcagcgcataatacaatgaatgcgggcatgacacagtcaaacttgcagcagcgttcactgaactctcaccagaaccaaaggtttgcagttccttccatggctggtggcagtggtgctcctgggaatacatatggacaacctgcacagtcgttttatcagcaaccgcctccagggcatatgaatagaactcctgtgtctaagaacgatgcatatcgtcttgtcccattggctcaattgaacccttatctagataaatggacaatcaaggtcagggtagtggccctgcaggtacctgaaataaaactctaaatgtaagttgtaatggagcaaagattaaaagagctaaaagtgatgttcaaatggtataagaggatacagtgacacaactgttaagaacacagttaatgaccacataatgaagcagtgtactgaaagaaagtagctgagggtacttaccaggccactaccctgaccttgattgtccatttatctagataagggttcaattgagccaatgggacaagacgatatgcatcgttcttagacacaggagttctattcatatgccctggaggcggttgctgataaaacgactgtgcaggttgtccatatgtattcccaggagcaccactgccaccagccatggaaggaactgcaaacctttggttctggtgagagttcagtgaacgctgctgcaagtttgactgtgtcatgcccgcattcattgtattatgcgctgaagttgtaccataagtgacacccga

SEQ ID NO: 185 - DNA, 5883 bp, Artificial Sequence
  Vector encoding ZKu70 silencing construct
aaagggaacaaaagctggactagaggcccttaaggcctctgcagtgcagcgtgacccggtcgtgcccctctctagagataatgagcattgcatgtctaagttataaaaaattaccacatattttttttgtcacacttgtttgaagtgcagtttatctatctttatacatatatttaaactttactctacgaataatataatctatagtactacaataatatcagtgttttagagaatcatataaatgaacagttagacatggtctaaaggacaattgagtattttgacaacaggactctacagttttatctttttagtgtgcatgtgttctcctttttttttgcaaatagcttcacctatataatacttcatccattttattagtacatccatttagggtttagggttaatggtttttatagactaatttttttagtacatctattttattctattttagcctctaaattaagaaaactaaaactctattttagtttttttatttaataatttagatataaaatagaataaaataaagtgactaaaaattaaacaaataccctttaagaaattaaaaaaactaaggaaacatttttcttgtttcgagtagataatgccagcctgttaaacgccgtcgatcgacgagtctaacggacaccaaccagcgaaccagcagcgtcgcgtcgggccaagcgaagcagacggcacggcatctctgtcgctgcctctggacccctctcgagagttccgctccaccgttggacttgctccgctgtcggcatccagaaattgcgtggcggagcggcagacgtgagccggcacggcaggcggcctcctcctcctctcacggcaccggcagctacgggggattcctttcccaccgctccttcgctttcccttcctcgcccgccgtaataaatagacaccccctccacaccctctttccccaacctcgtgttgttcggagcgcacacacacacaaccagatctcccccaaatccacccgtcggcacctccgcttcaaggtacgccgctcgtcctccccccccccccctctctaccttctctagatcggcgttccggtccatggttagggcccggtagttctacttctgttcatgtttgtgttagatccgtgtttgtgttagatccgtgctgctagcgttcgtacacggatgcgacctgtacgtcagacacgttctgattgctaacttgccagtgtttctctttggggaatcctgggatggctctagccgttccgcagacgggatcgatctaggataggtatacatgttgatgtgggttttactgatgcatatacatgatggcatatgcagcatctattcatatgctctaaccttgagtacctatctattataataaacaagtatgttttataattattttgatcttgatatacttggatgatggcatatgcagcagctatatgtggatttttttagccctgccttcatacgctatttatttgcttggtactgtttcttttgtcgatgctcaccctgttgtttggtgttacttctgcagatatcgagaattcgagctcggtacccggggagatgagatgaccgaatatttgccatctgctggtgataagctagaggatatgactaatcaactgagaaaacggataatgaagaagcgcagagtcaaaactctttcatttgcgattaccaatgatgtgtgcatagaagtcaatacatatgcgctggtccgtcctactactacagggacaatcacatggcttgattcactaagtaacctcccattaaaggttgagaggtctttcatatgcaatgatactggggctctacttcaggatgcacagacacgtttccagatgtacaatgacacaattgtcaaattttctgtacgtgaactctctgaggttaaaagggttgcaagccatcatcttcgccttataggtttcaagccattggattgcttgaaagattaccataacttaagaccatcgacatttatttatccgagtgatgagcgtatatttggaagcacctgtgttttcgttgctttacatagctcaatgtggccctgcaggtacctgaaataaaactctaaatgtaagttgtaatggagcaaagattaaaagagctaaaagtgatgttcaaatggtataagaggatacagtgacacaactgttaagaacacagttaatgaccacataatgaagcagtgtactgaaagaaagtagctgagggtacttaccaggccacattgagctatgtaaagcaacgaaaacacaggtgcttccaaatatacgctcatcactcggataaataaatgtcgatggtcttaagttatggtaatctttcaagcaatccaatggcttgaaacctataaggcgaagatgatggcttgcaacccttttaacctcagagagttcacgtacagaaaatttgacaattgtgtcattgtacatctggaaacgtgtctgtgcatcctgaagtagagccccagtatcattgcatatgaaagacctctcaacctttaatgggaggttacttagtgaatcaagccatgtgattgtccctgtagtagtaggacggaccagcgcatatgtattgacttctatgcacacatcattggtaatcgcaaatgaaagagttttgactctgcgcttcttcattatccgttttctcagttgattagtcatatcctctagcttatcaccagcagatggcaaatattcggtcatctcatctccgcgtgtcgactcgaatttccccgatcgttcaaacatttggcaataaagtttcttaagattgaatcctgttgccggtcttgcgatgattatcatataatttctgttgaattacgttaagcatgtaataattaacatgtaatgcatgacgttatttatgagatgggtttttatgattagagtcccgcaattatacatttaatacgcgatagaaaacaaaatatagcgcgcaaactaggataaattatcgcgcgcggtgtcatctatgttactagatcgctcgacgcggccgccatggccagatcgtacccaattcgccctatagtgagtcgtattacaattcactggccgtcgttttacaacgtcgtgactgggaaaaccctggcgttacccaacttaatcgccttgcagcacatccccctttcgccagctggcgtaatagcgaagaggcccgcaccgatcgcccttcccaacagttgcgcagcctgaatggcgaatggaaattgtaagcgttaatattttgttaaaattcgcgttaaatttttgttaaatcagctcattttttaaccaataggccgaaatcggcaaaatcccttataaatcaaaagaatagaccgagatagggttgagtgttgttccagtttggaacaagagtccactattaaagaacgtggactccaacgtcaaagggcgaaaaaccgtctatcagggcgatggcccactacgtgaaccatcaccctaatcaagttttttggggtcgaggtgccgtaaagcactaaatcggaaccctaaagggagcccccgatttagagcttgacggggaaagccggcgaacgtggcgagaaaggaagggaagaaagcgaaaggagcgggcgctagggcgctggcaagtgtagcggtcacgctgcgcgtaaccaccacacccgccgcgcttaatgcgccgctacagggcgcgtcaggtggcacttttcggggaaatgtgcgcggaacccctatttgtttatttttctaaatacattcaaatatgtatccgctcatgagacaataaccctgataaatgcttcaataatattgaaaaaggaagagtatgagtattcaacatttccgtgtcgcccttattcccttttttgcggcattttgccttcctgtttttgctcacccagaaacgctggtgaaagtaaaagatgctgaagatcagttgggtgcacgagtgggttacatcgaactggatctcaacagcggtaagatccttgagagttttcgccccgaagaacgttttccaatgatgagcacttttaaagttctgctatgtggcgcggtattatcccgtattgacgccgggcaagagcaactcggtcgccgcatacactattctcagaatgacttggttgagtactcaccagtcacagaaaagcatcttacggatggcatgacagtaagagaattatgcagtgctgccataaccatgagtgataacactgcggccaacttacttctgacaacgatcggaggaccgaaggagctaaccgcttttttgcacaacatgggggatcatgtaactcgccttgatcgttgggaaccggagctgaatgaagccataccaaacgacgagcgtgacaccacgatgcctgtagcaatggcaacaacgttgcgcaaactattaactggcgaactacttactctagcttcccggcaacaattaatagactggatggaggcggataaagttgcaggaccacttctgcgctcggcccttccggctggctggtttattgctgataaatctggagccggtgagcgtgggtctcgcggtatcattgcagcactggggccagatggtaagccctcccgtatcgtagttatctacacgacggggagtcaggcaactatggatgaacgaaatagacagatcgctgagataggtgcctcactgattaagcattggtaactgtcagaccaagtttactcatatatactttagattgatttaaaacttcatttttaatttaaaaggatctaggtgaagatcctttttgataatctcatgaccaaaatcccttaacgtgagttttcgttccactgagcgtcagaccccgtagaaaagatcaaaggatcttcttgagatcctttttttctgcgcgtaatctgctgcttgcaaacaaaaaaaccaccgctaccagcggtggtttgtttgccggatcaagagctaccaactctttttccgaaggtaactggcttcagcagagcgcagataccaaatactgtccttctagtgtagccgtagttaggccaccacttcaagaactctgtagcaccgcctacatacctcgctctgctaatcctgttaccagtggctgctgccagtggcgataagtcgtgtcttaccgggttggactcaagacgatagttaccggataaggcgcagcggtcgggctgaacggggggttcgtgcacacagcccagcttggagcgaacgacctacaccgaactgagatacctacagcgtgagctatgagaaagcgccacgcttcccgaagggagaaaggcggacaggtatccggtaagcggcagggtcggaacaggagagcgcacgagggagcttccagggggaaacgcctggtatctttatagtcctgtcgggtttcgccacctctgacttgagcgtcgatttttgtgatgctcgtcaggggggcggagcctatggaaaaacgccagcaacgcggcctttttacggttcctggccttttgctggccttttgctcacatgttctttcctgcgttatcccctgattctgtggataaccgtattaccgcctttgagtgagctgataccgctcgccgcagccgaacgaccgagcgcagcgagtcagtgagcgaggaagcggaagagcgcccaatacgcaaaccgcctctccccgcgcgttggccgattcattaatgcagctggcacgacaggtttcccgactggaaagcgggcagtgagcgcaacgcaattaatgtgagttagctcactcattaggcaccccaggctttacactttatgcttccggctcgtatgttgtgtggaattgtgagcggataacaatttcacacaggaaacagctatgaccatgattacgccaagctcgaaattaaccctcact

SEQ ID NO: 186 - DNA, 1168 bp, Artificial Sequence
  ZmKu70 silencing construct
gagatgagatgaccgaatatttgccatctgctggtgataagctagaggatatgactaatcaactgagaaaacggataatgaagaagcgcagagtcaaaactctttcatttgcgattaccaatgatgtgtgcatagaagtcaatacatatgcgctggtccgtcctactactacagggacaatcacatggcttgattcactaagtaacctcccattaaaggttgagaggtctttcatatgcaatgatactggggctctacttcaggatgcacagacacgtttccagatgtacaatgacacaattgtcaaattttctgtacgtgaactctctgaggttaaaagggttgcaagccatcatcttcgccttataggtttcaagccattggattgcttgaaagattaccataacttaagaccatcgacatttatttatccgagtgatgagcgtatatttggaagcacctgtgttttcgttgctttacatagctcaatgtggccctgcaggtacctgaaataaaactctaaatgtaagttgtaatggagcaaagattaaaagagctaaaagtgatgttcaaatggtataagaggatacagtgacacaactgttaagaacacagttaatgaccacataatgaagcagtgtactgaaagaaagtagctgagggtacttaccaggccacattgagctatgtaaagcaacgaaaacacaggtgcttccaaatatacgctcatcactcggataaataaatgtcgatggtcttaagttatggtaatctttcaagcaatccaatggcttgaaacctataaggcgaagatgatggcttgcaacccttttaacctcagagagttcacgtacagaaaatttgacaattgtgtcattgtacatctggaaacgtgtctgtgcatcctgaagtagagccccagtatcattgcatatgaaagacctctcaacctttaatgggaggttacttagtgaatcaagccatgtgattgtccctgtagtagtaggacggaccagcgcatatgtattgacttctatgcacacatcattggtaatcgcaaatgaaagagttttgactctgcgcttcttcattatccgttttctcagttgattagtcatatcctctagcttatcaccagcagatggcaaatattcggtcatctcatctc

SEQ ID NO: 187 - DNA, 5903 bp, Artificial Sequence
  Vector encoding ZmKu80 silencing construct
aaagggaacaaaagctggactagaggcccttaaggcctctgcagtgcagcgtgacccggtcgtgcccctctctagagataatgagcattgcatgtctaagttataaaaaattaccacatattttttttgtcacacttgtttgaagtgcagtttatctatctttatacatatatttaaactttactctacgaataatataatctatagtactacaataatatcagtgttttagagaatcatataaatgaacagttagacatggtctaaaggacaattgagtattttgacaacaggactctacagttttatctttttagtgtgcatgtgttctcctttttttttgcaaatagcttcacctatataatacttcatccattttattagtacatccatttagggtttagggttaatggtttttatagactaatttttttagtacatctattttattctattttagcctctaaattaagaaaactaaaactctattttagtttttttatttaataatttagatataaaatagaataaaataaagtgactaaaaattaaacaaataccctttaagaaattaaaaaaactaaggaaacatttttcttgtttcgagtagataatgccagcctgttaaacgccgtcgatcgacgagtctaacggacaccaaccagcgaaccagcagcgtcgcgtcgggccaagcgaagcagacggcacggcatctctgtcgctgcctctggacccctctcgagagttccgctccaccgttggacttgctccgctgtcggcatccagaaattgcgtggcggagcggcagacgtgagccggcacggcaggcggcctcctcctcctctcacggcaccggcagctacgggggattcctttcccaccgctccttcgctttcccttcctcgcccgccgtaataaatagacaccccctccacaccctctttccccaacctcgtgttgttcggagcgcacacacacacaaccagatctcccccaaatccacccgtcggcacctccgcttcaaggtacgccgctcgtcctccccccccccccctctctaccttctctagatcggcgttccggtccatggttagggcccggtagttctacttctgttcatgtttgtgttagatccgtgtttgtgttagatccgtgctgctagcgttcgtacacggatgcgacctgtacgtcagacacgttctgattgctaacttgccagtgtttctctttggggaatcctgggatggctctagccgttccgcagacgggatcgatctaggataggtatacatgttgatgtgggttttactgatgcatatacatgatggcatatgcagcatctattcatatgctctaaccttgagtacctatctattataataaacaagtatgttttataattattttgatcttgatatacttggatgatggcatatgcagcagctatatgtggatttttttagccctgccttcatacgctatttatttgcttggtactgtttcttttgtcgatgctcaccctgttgtttggtgttacttctgcagatatcgagaattcgagctcggtacccgggtgttgggtgctctcaagacaagaaatgtgctcccagttaccgttttcaggggagacctggaagtgaactccaattttaaaataaaggtgtgggtttataagaaaacagctgaggaaaaattccccactttgaagaagtattcggacaaagctcctccaagtgataaatttgcttctcatgaagtcaaagttgattatgagtacaagagtgttgttgagccagacaaagttgttccaccagaccagaggattaaggggtatctctatggtcctcaagttattcctgtatcaaatgctgaatgggaggcagtcaagttcaagccagagaaaggtgtgaagcttctaggatttacagatagatccagcgtaccacggcaccaatttatgaaagatgtatgcctgtttatacctgaaccaggcaacatgaaagcaagtcttgcagtttctgcgatagcaagagcaatgcatcaaatgaacaaggttgctatagtgcgatgtgtggtggccctgcaggtacctgaaataaaactctaaatgtaagttgtaatggagcaaagattaaaagagctaaaagtgatgttcaaatggtataagaggatacagtgacacaactgttaagaacacagttaatgaccacataatgaagcagtgtactgaaagaaagtagctgagggtacttaccaggccaccacacatcgcactatagcaaccttgttcatttgatgcattgctcttgctatcgcagaaactgcaagacttgctttcatgttgcctggttcaggtataaacaggcatacatctttcataaattggtgccgtggtacgctggatctatctgtaaatcctagaagcttcacacctttctctggcttgaacttgactgcctcccattcagcatttgatacaggaataacttgaggaccatagagataccccttaatcctctggtctggtggaacaactttgtctggctcaacaacactcttgtactcataatcaactttgacttcatgagaagcaaatttatcacttggaggagctttgtccgaatacttcttcaaagtggggaatttttcctcagctgttttcttataaacccacacctttattttaaaattggagttcacttccaggtctcccctgaaaacggtaactgggagcacatttcttgtcttgagagcacccaacacgcgtgtcgactcgaatttccccgatcgttcaaacatttggcaataaagtttcttaagattgaatcctgttgccggtcttgcgatgattatcatataatttctgttgaattacgttaagcatgtaataattaacatgtaatgcatgacgttatttatgagatgggtttttatgattagagtcccgcaattatacatttaatacgcgatagaaaacaaaatatagcgcgcaaactaggataaattatcgcgcgcggtgtcatctatgttactagatcgctcgacgcggccgccatggccagatcgtacccaattcgccctatagtgagtcgtattacaattcactggccgtcgttttacaacgtcgtgactgggaaaaccctggcgttacccaacttaatcgccttgcagcacatccccctttcgccagctggcgtaatagcgaagaggcccgcaccgatcgcccttcccaacagttgcgcagcctgaatggcgaatggaaattgtaagcgttaatattttgttaaaattcgcgttaaatttttgttaaatcagctcattttttaaccaataggccgaaatcggcaaaatcccttataaatcaaaagaatagaccgagatagggttgagtgttgttccagtttggaacaagagtccactattaaagaacgtggactccaacgtcaaagggcgaaaaaccgtctatcagggcgatggcccactacgtgaaccatcaccctaatcaagttttttggggtcgaggtgccgtaaagcactaaatcggaaccctaaagggagcccccgatttagagcttgacggggaaagccggcgaacgtggcgagaaaggaagggaagaaagcgaaaggagcgggcgctagggcgctggcaagtgtagcggtcacgctgcgcgtaaccaccacacccgccgcgcttaatgcgccgctacagggcgcgtcaggtggcacttttcggggaaatgtgcgcggaacccctatttgtttatttttctaaatacattcaaatatgtatccgctcatgagacaataaccctgataaatgcttcaataatattgaaaaaggaagagtatgagtattcaacatttccgtgtcgcccttattcccttttttgcggcattttgccttcctgtttttgctcacccagaaacgctggtgaaagtaaaagatgctgaagatcagttgggtgcacgagtgggttacatcgaactggatctcaacagcggtaagatccttgagagttttcgccccgaagaacgttttccaatgatgagcacttttaaagttctgctatgtggcgcggtattatcccgtattgacgccgggcaagagcaactcggtcgccgcatacactattctcagaatgacttggttgagtactcaccagtcacagaaaagcatcttacggatggcatgacagtaagagaattatgcagtgctgccataaccatgagtgataacactgcggccaacttacttctgacaacgatcggaggaccgaaggagctaaccgcttttttgcacaacatgggggatcatgtaactcgccttgatcgttgggaaccggagctgaatgaagccataccaaacgacgagcgtgacaccacgatgcctgtagcaatggcaacaacgttgcgcaaactattaactggcgaactacttactctagcttcccggcaacaattaatagactggatggaggcggataaagttgcaggaccacttctgcgctcggcccttccggctggctggtttattgctgataaatctggagccggtgagcgtgggtctcgcggtatcattgcagcactggggccagatggtaagccctcccgtatcgtagttatctacacgacggggagtcaggcaactatggatgaacgaaatagacagatcgctgagataggtgcctcactgattaagcattggtaactgtcagaccaagtttactcatatatactttagattgatttaaaacttcatttttaatttaaaaggatctaggtgaagatcctttttgataatctcatgaccaaaatcccttaacgtgagttttcgttccactgagcgtcagaccccgtagaaaagatcaaaggatcttcttgagatcctttttttctgcgcgtaatctgctgcttgcaaacaaaaaaaccaccgctaccagcggtggtttgtttgccggatcaagagctaccaactctttttccgaaggtaactggcttcagcagagcgcagataccaaatactgtccttctagtgtagccgtagttaggccaccacttcaagaactctgtagcaccgcctacatacctcgctctgctaatcctgttaccagtggctgctgccagtggcgataagtcgtgtcttaccgggttggactcaagacgatagttaccggataaggcgcagcggtcgggctgaacggggggttcgtgcacacagcccagcttggagcgaacgacctacaccgaactgagatacctacagcgtgagctatgagaaagcgccacgcttcccgaagggagaaaggcggacaggtatccggtaagcggcagggtcggaacaggagagcgcacgagggagcttccagggggaaacgcctggtatctttatagtcctgtcgggtttcgccacctctgacttgagcgtcgatttttgtgatgctcgtcaggggggcggagcctatggaaaaacgccagcaacgcggcctttttacggttcctggccttttgctggccttttgctcacatgttctttcctgcgttatcccctgattctgtggataaccgtattaccgcctttgagtgagctgataccgctcgccgcagccgaacgaccgagcgcagcgagtcagtgagcgaggaagcggaagagcgcccaatacgcaaaccgcctctccccgcgcgttggccgattcattaatgcagctggcacgacaggtttcccgactggaaagcgggcagtgagcgcaacgcaattaatgtgagttagctcactcattaggcaccccaggctttacactttatgcttccggctcgtatgttgtgtggaattgtgagcggataacaatttcacacaggaaacagctatgaccatgattacgccaagctcgaaattaaccctcact

SEQ ID NO: 188 - DNA, 1188 bp, Artificial Sequence
  ZmKu80 silencing construct
tgttgggtgctctcaagacaagaaatgtgctcccagttaccgttttcaggggagacctggaagtgaactccaattttaaaataaaggtgtgggtttataagaaaacagctgaggaaaaattccccactttgaagaagtattcggacaaagctcctccaagtgataaatttgcttctcatgaagtcaaagttgattatgagtacaagagtgttgttgagccagacaaagttgttccaccagaccagaggattaaggggtatctctatggtcctcaagttattcctgtatcaaatgctgaatgggaggcagtcaagttcaagccagagaaaggtgtgaagcttctaggatttacagatagatccagcgtaccacggcaccaatttatgaaagatgtatgcctgtttatacctgaaccaggcaacatgaaagcaagtcttgcagtttctgcgatagcaagagcaatgcatcaaatgaacaaggttgctatagtgcgatgtgtggtggccctgcaggtacctgaaataaaactctaaatgtaagttgtaatggagcaaagattaaaagagctaaaagtgatgttcaaatggtataagaggatacagtgacacaactgttaagaacacagttaatgaccacataatgaagcagtgtactgaaagaaagtagctgagggtacttaccaggccaccacacatcgcactatagcaaccttgttcatttgatgcattgctcttgctatcgcagaaactgcaagacttgctttcatgttgcctggttcaggtataaacaggcatacatctttcataaattggtgccgtggtacgctggatctatctgtaaatcctagaagcttcacacctttctctggcttgaacttgactgcctcccattcagcatttgatacaggaataacttgaggaccatagagataccccttaatcctctggtctggtggaacaactttgtctggctcaacaacactcttgtactcataatcaactttgacttcatgagaagcaaatttatcacttggaggagctttgtccgaatacttcttcaaagtggggaatttttcctcagctgttttcttataaacccacacctttattttaaaattggagttcacttccaggtctcccctgaaaacggtaactgggagcacatttcttgtcttgagagcacccaaca

SEQ ID NO: 189 - DNA, 5863 bp, Artificial Sequence
  Vector encoding ZmLig4 silencing construct
aaagggaacaaaagctggactagaggcccttaaggcctctgcagtgcagcgtgacccggtcgtgcccctctctagagataatgagcattgcatgtctaagttataaaaaattaccacatattttttttgtcacacttgtttgaagtgcagtttatctatctttatacatatatttaaactttactctacgaataatataatctatagtactacaataatatcagtgttttagagaatcatataaatgaacagttagacatggtctaaaggacaattgagtattttgacaacaggactctacagttttatctttttagtgtgcatgtgttctcctttttttttgcaaatagcttcacctatataatacttcatccattttattagtacatccatttagggtttagggttaatggtttttatagactaatttttttagtacatctattttattctattttagcctctaaattaagaaaactaaaactctattttagtttttttatttaataatttagatataaaatagaataaaataaagtgactaaaaattaaacaaataccctttaagaaattaaaaaaactaaggaaacatttttcttgtttcgagtagataatgccagcctgttaaacgccgtcgatcgacgagtctaacggacaccaaccagcgaaccagcagcgtcgcgtcgggccaagcgaagcagacggcacggcatctctgtcgctgcctctggacccctctcgagagttccgctccaccgttggacttgctccgctgtcggcatccagaaattgcgtggcggagcggcagacgtgagccggcacggcaggcggcctcctcctcctctcacggcaccggcagctacgggggattcctttcccaccgctccttcgctttcccttcctcgcccgccgtaataaatagacaccccctccacaccctctttccccaacctcgtgttgttcggagcgcacacacacacaaccagatctcccccaaatccacccgtcggcacctccgcttcaaggtacgccgctcgtcctccccccccccccctctctaccttctctagatcggcgttccggtccatggttagggcccggtagttctacttctgttcatgtttgtgttagatccgtgtttgtgttagatccgtgctgctagcgttcgtacacggatgcgacctgtacgtcagacacgttctgattgctaacttgccagtgtttctctttggggaatcctgggatggctctagccgttccgcagacgggatcgatctaggataggtatacatgttgatgtgggttttactgatgcatatacatgatggcatatgcagcatctattcatatgctctaaccttgagtacctatctattataataaacaagtatgttttataattattttgatcttgatatacttggatgatggcatatgcagcagctatatgtggatttttttagccctgccttcatacgctatttatttgcttggtactgtttcttttgtcgatgctcaccctgttgtttggtgttacttctgcagatatcgagaattcgagctcggtacccgggtcaaaggagagaccagatgtttggattgaaagtcctgataagtcagtcataatatctgtaacaagtgacattcgtacaatcaagtctgaggtatttgctgctccatactgtttgaggttcccccgtattcagcgagtgagatatgacaagccatggcatgagtgccttgatgtgcaggcatttgtggacattgtgcattcaaataatggtacaatacaaagggtggcagatgataatagcctgaagaatgatgacacaaaacattcaagaacaaacaaaaaaagtagagaagtgtgtctcaatcatcccttcacatttcatgaaaactgatgtatcaggtctcaagggagaaaccttgatatttgccaacctgattttctattttgtcaacattccatcatcatataatctcgaatattttcataaactggttgtggaaaatgggggatctttctccatgaatctcaatgactctgttacgtggccctgcaggtacctgaaataaaactctaaatgtaagttgtaatggagcaaagattaaaagagctaaaagtgatgttcaaatggtataagaggatacagtgacacaactgttaagaacacagttaatgaccacataatgaagcagtgtactgaaagaaagtagctgagggtacttaccaggccacgtaacagagtcattgagattcatggagaaagatcccccattttccacaaccagtttatgaaaatattcgagattatatgatgatggaatgttgacaaaatagaaaatcaggttggcaaatatcaaggtttctcccttgagacctgatacatcagttttcatgaaatgtgaagggatgattgagacacacttctctactttttttgtttgttcttgaatgttttgtgtcatcattcttcaggctattatcatctgccaccctttgtattgtaccattatttgaatgcacaatgtccacaaatgcctgcacatcaaggcactcatgccatggcttgtcatatctcactcgctgaatacgggggaacctcaaacagtatggagcagcaaatacctcagacttgattgtacgaatgtcacttgttacagatattatgactgacttatcaggactttcaatccaaacatctggtctctcctttgacgcgtgtcgactcgaatttccccgatcgttcaaacatttggcaataaagtttcttaagattgaatcctgttgccggtcttgcgatgattatcatataatttctgttgaattacgttaagcatgtaataattaacatgtaatgcatgacgttatttatgagatgggtttttatgattagagtcccgcaattatacatttaatacgcgatagaaaacaaaatatagcgcgcaaactaggataaattatcgcgcgcggtgtcatctatgttactagatcgctcgacgcggccgccatggccagatcgtacccaattcgccctatagtgagtcgtattacaattcactggccgtcgttttacaacgtcgtgactgggaaaaccctggcgttacccaacttaatcgccttgcagcacatccccctttcgccagctggcgtaatagcgaagaggcccgcaccgatcgcccttcccaacagttgcgcagcctgaatggcgaatggaaattgtaagcgttaatattttgttaaaattcgcgttaaatttttgttaaatcagctcattttttaaccaataggccgaaatcggcaaaatcccttataaatcaaaagaatagaccgagatagggttgagtgttgttccagtttggaacaagagtccactattaaagaacgtggactccaacgtcaaagggcgaaaaaccgtctatcagggcgatggcccactacgtgaaccatcaccctaatcaagttttttggggtcgaggtgccgtaaagcactaaatcggaaccctaaagggagcccccgatttagagcttgacggggaaagccggcgaacgtggcgagaaaggaagggaagaaagcgaaaggagcgggcgctagggcgctggcaagtgtagcggtcacgctgcgcgtaaccaccacacccgccgcgcttaatgcgccgctacagggcgcgtcaggtggcacttttcggggaaatgtgcgcggaacccctatttgtttatttttctaaatacattcaaatatgtatccgctcatgagacaataaccctgataaatgcttcaataatattgaaaaaggaagagtatgagtattcaacatttccgtgtcgcccttattcccttttttgcggcattttgccttcctgtttttgctcacccagaaacgctggtgaaagtaaaagatgctgaagatcagttgggtgcacgagtgggttacatcgaactggatctcaacagcggtaagatccttgagagttttcgccccgaagaacgttttccaatgatgagcacttttaaagttctgctatgtggcgcggtattatcccgtattgacgccgggcaagagcaactcggtcgccgcatacactattctcagaatgacttggttgagtactcaccagtcacagaaaagcatcttacggatggcatgacagtaagagaattatgcagtgctgccataaccatgagtgataacactgcggccaacttacttctgacaacgatcggaggaccgaaggagctaaccgcttttttgcacaacatgggggatcatgtaactcgccttgatcgttgggaaccggagctgaatgaagccataccaaacgacgagcgtgacaccacgatgcctgtagcaatggcaacaacgttgcgcaaactattaactggcgaactacttactctagcttcccggcaacaattaatagactggatggaggcggataaagttgcaggaccacttctgcgctcggcccttccggctggctggtttattgctgataaatctggagccggtgagcgtgggtctcgcggtatcattgcagcactggggccagatggtaagccctcccgtatcgtagttatctacacgacggggagtcaggcaactatggatgaacgaaatagacagatcgctgagataggtgcctcactgattaagcattggtaactgtcagaccaagtttactcatatatactttagattgatttaaaacttcatttttaatttaaaaggatctaggtgaagatcctttttgataatctcatgaccaaaatcccttaacgtgagttttcgttccactgagcgtcagaccccgtagaaaagatcaaaggatcttcttgagatcctttttttctgcgcgtaatctgctgcttgcaaacaaaaaaaccaccgctaccagcggtggtttgtttgccggatcaagagctaccaactctttttccgaaggtaactggcttcagcagagcgcagataccaaatactgtccttctagtgtagccgtagttaggccaccacttcaagaactctgtagcaccgcctacatacctcgctctgctaatcctgttaccagtggctgctgccagtggcgataagtcgtgtcttaccgggttggactcaagacgatagttaccggataaggcgcagcggtcgggctgaacggggggttcgtgcacacagcccagcttggagcgaacgacctacaccgaactgagatacctacagcgtgagctatgagaaagcgccacgcttcccgaagggagaaaggcggacaggtatccggtaagcggcagggtcggaacaggagagcgcacgagggagcttccagggggaaacgcctggtatctttatagtcctgtcgggtttcgccacctctgacttgagcgtcgatttttgtgatgctcgtcaggggggcggagcctatggaaaaacgccagcaacgcggcctttttacggttcctggccttttgctggccttttgctcacatgttctttcctgcgttatcccctgattctgtggataaccgtattaccgcctttgagtgagctgataccgctcgccgcagccgaacgaccgagcgcagcgagtcagtgagcgaggaagcggaagagcgcccaatacgcaaaccgcctctccccgcgcgttggccgattcattaatgcagctggcacgacaggtttcccgactggaaagcgggcagtgagcgcaacgcaattaatgtgagttagctcactcattaggcaccccaggctttacactttatgcttccggctcgtatgttgtgtggaattgtgagcggataacaatttcacacaggaaacagctatgaccatgattacgccaagctcgaaattaaccctcact

SEQ ID NO: 190 - DNA, 1148 bp, Artificial Sequence
  ZmLig4 silencing construct
tcaaaggagagaccagatgtttggattgaaagtcctgataagtcagtcataatatctgtaacaagtgacattcgtacaatcaagtctgaggtatttgctgctccatactgtttgaggttcccccgtattcagcgagtgagatatgacaagccatggcatgagtgccttgatgtgcaggcatttgtggacattgtgcattcaaataatggtacaatacaaagggtggcagatgataatagcctgaagaatgatgacacaaaacattcaagaacaaacaaaaaaagtagagaagtgtgtctcaatcatcccttcacatttcatgaaaactgatgtatcaggtctcaagggagaaaccttgatatttgccaacctgattttctattttgtcaacattccatcatcatataatctcgaatattttcataaactggttgtggaaaatgggggatctttctccatgaatctcaatgactctgttacgtggccctgcaggtacctgaaataaaactctaaatgtaagttgtaatggagcaaagattaaaagagctaaaagtgatgttcaaatggtataagaggatacagtgacacaactgttaagaacacagttaatgaccacataatgaagcagtgtactgaaagaaagtagctgagggtacttaccaggccacgtaacagagtcattgagattcatggagaaagatcccccattttccacaaccagtttatgaaaatattcgagattatatgatgatggaatgttgacaaaatagaaaatcaggttggcaaatatcaaggtttctcccttgagacctgatacatcagttttcatgaaatgtgaagggatgattgagacacacttctctactttttttgtttgttcttgaatgttttgtgtcatcattcttcaggctattatcatctgccaccctttgtattgtaccattatttgaatgcacaatgtccacaaatgcctgcacatcaaggcactcatgccatggcttgtcatatctcactcgctgaatacgggggaacctcaaacagtatggagcagcaaatacctcagacttgattgtacgaatgtcacttgttacagatattatgactgacttatcaggactttcaatccaaacatctggtctctcctttga

SEQ ID NO: 191 - DNA, 2078 bp, Artificial Sequence
  Sequence from Figure 6
ctcggactcggcctcggccacggaagacagactcgacctcggcttcggaggagcctccacatcgcccaacctagggcgcaggccagccacgtcaacaggaggcgccatcatcaccctaccccgagctgactcgggccgcagggaacaagaccggcgtcccatctggctagctccgccagataggcaatgatggcgccccgcatactctgtaacgacggcggctctcagcccccttacggaagcaagaggacgtcagcaaggacccaaccgctccgacagctgtccctccgccaggctccatcgctcctccgacggccacgacatcacaccagctgggtgccaaagtctctccgtctgccacaacggcatgtacttagggcgctagctctcctccgctagacacgtagcactctgctacaccccccattgtacacctggatcctctccttacgcctataaaaggaaggaccagggccctcttggagagggttggccgcgcggggacgaggacgagacaggcgctcgcctggagccgctcgctccctctcccgcgtggacgcttgtaaccccctactgcaagcgcacccgaccggggcgcgggacgaacatgaaggccgcgggattcccacctctctcacgccggtctccggccgcctcgctctccccccttcgcgctcgccctcgcgctcgacccatctgggctggggcacgcggcgacactcactcgtcggcccagggaccccccggtctcgaaacgtcgacacatttaatgcttaatctaacaataattacttttatatatttgatcgaactttaaaagatttggctcctcagaaagatagacgatgtgcatttattttagaaatgataggatatatttaaggcgacatatggaatagacaggttgggatggagtagatatatatagattcatacgactaaagttgtgttcagcagatcatatatatagctatgcaaaacactattttacactgtagatagcaatatttatgttgtttagagagtgaattttgaaataagaggtgagatagagaatgtgatatggcagctaagagctagttttcaacaagtttgtttctataatagtatagctagatagacagacacgtagctaaaatggtcaactgaccttcgtacaaaaaaaaactttaatccagagatatagcaatatatgcttataactccagacctcagagtcaacccacagatttttgtatattcgtcaaaaagatccacagatttgtggtagagagtatgttttagtagtagtggtatatctcccttgtgggacgacgaagcagccggtcagccggcgctccggccggccggccggcctgcgcctgcacagtacaaatagcaccccccgtcctccagttggctgcatccttctagcttcgatctctatatacctctgtatgtgagtgaggccaatgagagccctcgtagtcgtaagtttcgcttcggcgtgcttgctgctgctgttgcagctcgcaggagcgtcgcatgtcgtctacaactacaaggacctcgaagccgaggctgctgcggcgacggaccaggtgccgccgtccatcgtcaaccccctgctcaggacggggtaccacttccagccccccaagaactggatcaatggtaatgtaaagctactaactaatccaccacccaacgtcgtttgaaggtgatgtgtgtgttaagcatctcctgaaatatataagagagcgaggctagtaatcggcttgttgttcagggttttggtttaccacttgtagcctcaactaataaagctatatatatgagagcgacgagagagaagagacaaaacattcatgagtatggtcagacagactagctagctagacacggcagagaaattacgagagttaaaaaaaatgcgcttgaagggtgaaccaaaacaaaacaactttagtactatgcgtcaacaaagctgtgttcatgtgtcagctagcactagagtcatagtgcgtggccagtgagctgttgtctagcaaccaacgcgaactgaagtttgagagcgtactcgtgttctcgatctcttg

SEQ ID NO: 192 - DNA, 21 bp, Artificial Sequence
  Sequence gRNA2 from Figure 6
aggcgacatatggaatagaca

SEQ ID NO: 193 - DNA, 21 bp, Artificial Sequence
  gRNA 3 sequence from Figure 6
gtagtagtggtatatctccct

SEQ ID NO: 194 - DNA, 21 bp, Artificial Sequence
  gRNA 10 sequence from Figure 6
gtactatgcgtcaacaaagct

SEQ ID NO: 195 - DNA, 783 bp, Artificial Sequence
  RBP1
atggagtcgggctccgggacggctgctggctctggctatgtttacagacagccaggatcaacgcggtggaacccgacagctgaacaactgtccttgcttagagaaatctactaccgcaacggattgcggaccccgaccgcggacgaaatcagacaaatcagctcaaagctctcaaggtacggaaaaatagagggcaaaaacgtttacaactggttccagaatagacgcgcaagagaaaagcgcaagcaacggctctctacaatcggctgtgatccagcactgatcgagatggggaatgtcgcttcactggaattcggtactgagagcgccctggaatcgctgtcgtcaggaccatcctcagaactccgcgaagcgccaacgagaaaattttacgaaaaaaagacggttggagagaactcaactataataaacccagtggaacaaaactgtaccctttcctgcggaacgtcccaagagttccagtatgcggtcgattctcggcgcgtcatgaaagctatggaggaaaagcaggcgacggacgatgaacccgacggaaataaatggactgagtcaaacagacacgtcaagattctccagcttttcccgctccacaataacgaggatcagacattgataaagagcgacaaagaaatctattgtttgggctcgtgcgagaagaaaatggatttgtcaccgctgggtcattcaggctctcagcgcgcttcggcccttgacttgtgcctttcattgggcaacgaatcttgtgggctgcatgataattga

SEQ ID NO: 196 - DNA, 783 bp, Artificial Sequence; identical to SEQ ID NO: 195
  RBP3

SEQ ID NO: 197 - DNA, 477 bp, Artificial Sequence
  RBP4
atggtctcgaaaggagaagaggtcatcaaagaattttcaggcagcacccgctggaatccgactgcagaacaactttctctcctcaaagagctttattacagaaatgggatcagaaccccttcagcggaccagatacgccagataagcgcccgcttgtcgaggtacggcaaaatcgaggggaagaatgttttttactggttccaaaaccataaagcgagggagcggcagaagaaaagactgagcactgtgggttgtggatcggcgggatcggctgccgggtcaggtgaatttcgccatgttaaaacgcttccactgtttcccttgcataataatgaagacagcggatcacttgacctggagctggagttgggcttcgcttccgcgacggctgctgcaacatccggctcgcagcgggcgtcggcgctggatttgtgcctttcgctgggaaatgagagctgcggtcttcatgacaactga

SEQ ID NO: 198 - DNA, 501 bp, Artificial Sequence
  RBP5
atggtgtctaaaggggaagaggtcataaaagagttctcaggttctactcgctggaatccaactgcagaacaactctctctcctgaaggagctctactatcggaacggaatacgcacgccttcggcggaccaaataaggcagatttcagcccgcctgtctagatacgggaaaatcgagggaaagaacgtgttttattggttccaaaaccataaggcaagagagcggcagaaaaaacggctcagcacagtcggctgtgggtcagccggttcggcggctggctctggtgaattccgccacgtcaaaaccctgcctctgttcccgctccacaataatgtcgagacacttcccttgttcccggaggattccgggtctctcgacttggagctcgaattgggctttgcctctgccactgcggcagcgaccagcggatcacagagagcctccgcactggatctgtgcctgtcacttggaaatgaatcgtgcggattgcacgacaattga

SEQ ID NO: 199 - DNA, 771 bp, Artificial Sequence
  RBP6
atggtgtctaaaggcgaagaggtcattaaggagttcagcggctctactagatggaatccaacggccgagcaacttagcctgctcaaagaactctattatcgcaatgggatacgcacgccctctgcagatcagatacgccaaatctcagcgcgcctgtccaggtatgggaagattgagggtaaaaacgtcttttactggttccaaaatcacaaagcgcgcgagagacagaagaaaagactcagcaccgttggttgtgaccctgctctcatcgagatggggaatgttgcttccctggagtttggcacagagagcgctttggaatcactctcttccggcccctcaagcgaactcagagaggctcccactcggaagttttacgagaaaaaaaccgtcggagaaaacagcacgattatcaaccccgtcgagcagaactgcaccctctcatgcggcacgtcccaggagtttcagtacgccgtcgactcgaggagagtgatgaaggcgatggaggaaaagcaagcaactgacgacgagcccgacggaaacaagtggactgaatccaatcgccatgttaaaacgttgcctttgttcccgctccataacaatgtggagacgttgccactcttcccggaggactcgggatctctggacttggagctggaactgggctttgcttcggctaccgcagcagccacctcgggttcccagagagcctcggctcttgatctctgcctgtcactgggtaacgaatcttgcggactgcacgataattag

SEQ ID NO: 200 - DNA, 840 bp, Artificial Sequence
  RBP7
atggtttcaaagggggaggaggtcataaaagaattttctggcagcactagatggaatccgactgctgagcagttgtctctcctcaaagaactttactataggaacggtatccgcactccgtccgctgatcaaattcgccaaatttcggccagactgtccagatacgggaaaattgagggaaaaaatgttttctactggttccagaatcataaggcgcgcgaaaggcagaaaaagagactttcgaccgtcggatgtgaccctgcacttatcgaaatgggcaatgtcgcgtcgttggagtttggcaccgaatccgctctcgaatctcttagctcgggcccctcatcggaactcagagaggcccctaccagaaaattttatgagaaaaagacagtgggagagaactctacaatcattaaccccgtcgagcagaactgcacattgagctgtggaacatcgcaggagtttcaatacgcggtggattcgcgccgcgttatgaaggcaatggaggagaagcaggcaacagatgatgagccagacggcaataaatggaccgaatctaacagacatgtcaagacactgccacttttccctctccacaacaatgtcgagacactccctctgtttcccgaggattcgggaagcctggatcttgagctggaacttggctttgcatcaggtggatctgccgggtcagttgacacgctgccattgtttcctagagaggctgcgggttctggggaatttgccactgcggctgcgactagcggatcacagcgcgcatcggcgctcgacctctgcctttctttgggtaacgagtcttgcggcctgcatgacaactga

SEQ ID NO: 201 - DNA, 498 bp, Artificial Sequence
  RBP8
atggtttcgaagggggaagaagtcattaaagagttttcagggtctacgcgctggaaccctaccgctgaacaagtcaaggttttgagggaaatatattaccgcgcgggtcttaggacgccatccgcggatcagatccgccaaatatcctcacagctgaaacggtatggaaaggtggaaggaaaaaacgtgttttattggttccagaaccataaagcgcgggaaagacaaaaaaagcggctcagcaccgttgggagcgctggctcagcagcgggttcaggtgagttcaggcacgttaaaacactgcccttgttccctttgcacaataatgaagactcagggagcggtttggacttggatctgaaccttgagttgcgcctgtcggcgactgctgctgccacttcgggctcacagcgggcgtctgccctcgatctggacttggagctcagactcggtttcgcgcttggtaatgagtcgtgtggactgcacgacaactagtga

SEQ ID NO: 202 - protein, 260 aa, Artificial Sequence
  RBP1
MESGSGTAAGSGYVYRQPGSTRWNPTAEQLSLLREIYYRNGLRTPTADEIRQISSKLSRYGKIEGKNVYNWFQNRRAREKRKQRLSTIGCDPALIEMGNVASLEFGTESALESLSSGPSSELREAPTRKFYEKKTVGENSTIINPVEQNCTLSCGTSQEFQYAVDSRRVMKAMEEKQATDDEPDGNKWTESNRHVKILQLFPLHNNEDQTLIKSDKEIYCLGSCEKKMDLSPLGHSGSQRASALDLCLSLGNESCGLHDN

SEQ ID NO: 203 - protein, 158 aa, Artificial Sequence
  RBP3
MVSKGEEVIKEFPGSTRWNPTAEQLSLLREIYYRNGLRTPTADEIRQISSKLSRYGKIEGKNVYNWFQNRRAREKRKQRLSTIGCGSAGSAAGSGEFRHVKTLPLFPLHNNEDSGSLDLELELGFASATAAATSGSQRASALDLCLSLGNESCGLHDN

SEQ ID NO: 204 - protein, 158 aa, Artificial Sequence
  RBP4
MVSKGEEVIKEFSGSTRWNPTAEQLSLLKELYYRNGIRTPSADQIRQISARLSRYGKIEGKNVFYWFQNHKARERQKKRLSTVGCGSAGSAAGSGEFRHVKTLPLFPLHNNEDSGSLDLELELGFASATAAATSGSQRASALDLCLSLGNESCGLHDN

SEQ ID NO: 205 - protein, 166 aa, Artificial Sequence
  RBP5
MVSKGEEVIKEFSGSTRWNPTAEQLSLLKELYYRNGIRTPSADQIRQISARLSRYGKIEGKNVFYWFQNHKARERQKKRLSTVGCGSAGSAAGSGEFRHVKTLPLFPLHNNVETLPLFPEDSGSLDLELELGFASATAAATSGSQRASALDLCLSLGNESCGLHDN

SEQ ID NO: 206 - protein, 256 aa, Artificial Sequence
  RBP6
MVSKGEEVIKEFSGSTRWNPTAEQLSLLKELYYRNGIRTPSADQIRQISARLSRYGKIEGKNVFYWFQNHKARERQKKRLSTVGCDPALIEMGNVASLEFGTESALESLSSGPSSELREAPTRKFYEKKTVGENSTIINPVEQNCTLSCGTSQEFQYAVDSRRVMKAMEEKQATDDEPDGNKWTESNRHVKTLPLFPLHNNVETLPLFPEDSGSLDLELELGFASATAAATSGSQRASALDLCLSLGNESCGLHDN

SEQ ID NO: 207 - protein, 279 aa, Artificial Sequence
  RBP7
MVSKGEEVIKEFSGSTRWNPTAEQLSLLKELYYRNGIRTPSADQIRQISARLSRYGKIEGKNVFYWFQNHKARERQKKRLSTVGCDPALIEMGNVASLEFGTESALESLSSGPSSELREAPTRKFYEKKTVGENSTIINPVEQNCTLSCGTSQEFQYAVDSRRVMKAMEEKQATDDEPDGNKWTESNRHVKTLPLFPLHNNVETLPLFPEDSGSLDLELELGFASGGSAGSVDTLPLFPREAAGSGEFATAAATSGSQRASALDLCLSLGNESCGLHDN

SEQ ID NO: 208 - protein, 164 aa, Artificial Sequence
  RBP8
MVSKGEEVIKEFSGSTRWNPTAEQVKVLREIYYRAGLRTPSADQIRQISSQLKRYGKVEGKNVFYWFQNHKARERQKKRLSTVGSAGSAAGSGEFRHVKTLPLFPLHNNEDSGSGLDLDLNLELRLSATAAATSGSQRASALDLDLELRLGFALGNESCGLHDN

SEQ ID NO: 209 - DNA, 2040 bp, Artificial Sequence
  ZmPLT3-17207
atggcttcagcgaacaactggctgggcttctcgctctcgggccaggataacccgcagcctaaccaggatagctcgcctgccgccggtatcgacatctccggcgccagcgacttctatggcctgcccacgcagcagggctccgacgggcatctcggcgtgccgggcctgcgggacgatcacgcttcttatggtatcatggaggcctacaacagggttcctcaagaaacccaagattggaacatgaggggcttggactacaacggcggtggctcggagctctcgatgcttgtggggtccagcggcggcggcgggggcaacggcaagagggccgtggaagacagcgagcccaagctcgaagatttcctcggcggcaactcgttcgtctccgatcaagatcagtccggcggttacctgttctctggagtcccgatagccagcagcgccaatagcaacagcgggagcaacaccatggagctatccatgatcaagacctggctacggaacaaccaggtggcccagccccagccgccagctccacatcagccgcagcctgaggaaatgagcaccgacgccagcggcagcagctttggatgctcggattcgatgggaaggaacagcatggtggcggctggtgggagctcgcagagcctggcgctctcgatgagcacgggctcgcacctgcccatggttgtggccggcggcagcgccagcggagcggcctcggagagcacgtcgtcggagaacaagcgagcgagcggtgccatggattcgcccggcagcgcggtagaagccgtaccgaggaagtccatcgacacgttcgggcaaaggacctctatatatcgaggtgtaacaaggcatagatggacagggcggtatgaggctcatctatgggataatagttgtagaagagaagggcagagtcgcaagggtaggcaagtttaccttggtggctatgacaaggaggacaaggcagcaagggcttacgatttggcagctctcaagtattggggcactacgacaacaacaaatttccctataagcaactacgaaaaggagctagaagaaatgaaacatatgactagacaggagtacattgcatacctaagaagaaatagcagtggattttctcgtggggcgtcaaagtatcgtggagtaactagacatcatcagcatgggagatggcaagcaaggatagggagagttgcaggaaacaaggatctctacttgggcacattcagcaccgaggaggaggcggcggaggcctacgacatcgccgcgatcaagttccgcggtctcaacgccgtcaccaacttcgacatgagccgctacgacgtgaagagcatcctcgagagcagcacactgcctgtcggcggcgcggccaggcgcctcaaggacgccgtggaccacgtggaggccggcgccactatctggcgcgccgacatggacggcgccgtgatctcccagctggccgaagccgggatgggcggctacgcctcgtacggccaccacggctggccgaccatcgcgttccagcagccgtcgccgctctccgtccactacccgtacggccagccgtcccgcgggtggtgcaaacccgagcaggacgcggccgccgccgcggcccacagcctgcaggacctccagcagctgcacctcggcagcgcggcccacaacttcttccaggcgtcgtcgagctccacagtctacaacggcggcgccggcgccagtggtgggtaccagggcctcggtggtggtagctccttcctcatgccgtcgagcactgtcgtggcggcggccgaccaggggcacagcagcacggcaaaccaggggagcacgtgcagctacggggacgaccaccaggaggggaagctcatcggttacgacgccgccatggtggcgaccgcagctggtggagacccgtacgctgcggcgaggaacgggtaccagttctcgcagggctcgggatccacggtgagcatcgcgagggcgaacgggtacgctaacaactggagctctcctttcaacaacggcatggggtga

SEQ ID NO: 210 - DNA, 1485 bp, Artificial Sequence
  ZmPLT3-17207
atggacacctcgcaccactatcatccatggctcaacttctccctcgcccaccactgtgacctcgaggaggaggagaggggcgcggccgccgagctggccgcgatagccggcgccgcgccgccgccgaagctggaggacttcctcggcggaggcgtcgccaccggtggtccggaggcggtggcgcccgcggagatgtacgactcggacctcaagttcatagccgccgccgggttccttggcggctcggcggcggcggcggcgacgtcgccgctgtcctccctcgaccaggccggttccaagctggccttgcctgcggcggcggctgctccggcgccggagcagaggaaggccgtcgactcctttgggcagcgcacgtccatctaccgcggcgtcacacggcaccggtggactggcaggtacgaggcacatctgtgggacaacagctgccgacgcgaagggcagagccgcaagggccgccaagtatatttgggtggctatgataaggaggagaaggctgccagggcgtatgatcttgcagctttgaagtactggggttctagcaccaccaccaactttccggttgctgagtatgagaaggaggtcgaggagatgaagaacatgacgcgacaagagtttgttgcttcccttcgaaggaagagcagtggattctctcggggtgcttccatctacagaggtgtaaccagacatcaccagcatggacggtggcaggcgaggatcggaagggtggccggtaacaaggacctctaccttgggacgttcagcaccgaggaggaagctgcagaggcctacgacatagcggccatcaagttcagaggcctgaacgccgtcacaaacttcgagatcagccggtacaacgtggagaccataatgagcagcaaccttccagtcgcgagcatgtcgtcgtcgtcggcggcggcggcgggtggccggagcagcaaggcgctggagtcccctccgtccggctcgcttgacggcggcggcggcatgccagtcgtcgaaggcagcacggcaccgccgctgttcattccggtgaagtacgaccagcagcagcaggagtacctgtcgatgctcgcgttgcagcaccaccaccagcagcaacaagcagggaacctgttgcaggggccgctagtagggttcggcggcctctactcctccggggtgaacctggatttcgccaactcccacggcacggcggctccgtcgtcgatggcccaccactgctacgccaatggcaccgcgtccgcctcgcatgagcaccagcaccagcaccagatgcagcagggcggcgagaacgagacgcagccgcagccgcagcagagctccagcagctgctcctccctgccattcgccaccccggtcgctttcaatgggtcctatgaaagctccatcacggcggcaggcccctttggatactcctacccaaatgtggcagcctttcagacgccgatctatggaatggaatga

SEQ ID NO: 211 - DNA, 1470 bp, Artificial Sequence
  ZmPLT7
atggacatggacatgagctcagcttatccccaccattggctctccttctccctctccaacaactaccaccatggcctactcgaggccttctctaactcctccggtactcctcttggagacgagccgggcgcagtggaggagtccccgaggacggtggaggacttcctcggcggcgtcggtggcgccggcgccccgccgcagccggcggctgctgcagatcaggatcaccagcttgtgtgcggcgagctgggcagcatcacagccaggttcttgcgccactacccggcggcgccagctgggacgacggtggagaaccccggcgcggtgaccgtggcggccatgtcgtcgacggacgtggcgggggcggagtccgaccaggcgaggcggcccgccgagacgttcggccagcgcacatccatctaccgtggcgtcaccaggcaccggtggacagggagatatgaggcgcacttgtgggacaacagctgccgccgggagggccaaagccgcaaaggacgccaagtctacctaggaggctatgacaaggaggagaaggcggctagagcttacgacctcgccgcgctcaagtactgggggcctacaaccacgaccaacttcccggtgtccaactacgagaaggagctggaggagatgaagtccatgacgcggcaggagttcatcgcgtcgttgcgcaggaagagcagcggcttctcacgaggcgcctccatctacagaggagtcacaaggcatcatcagcacggccggtggcaggcgaggatcggcagggtggccggaaacaaggacctgtacttgggcactttcagtactcaggaagaggcggcggaggcgtacgacatcgctgcgatcaagttccgcgggctcaacgccgtcaccaacttcgacatgagccgctacgacgtggagagcatcctcagcagcgacctccccgtcgggggcggagccaccgggcgcgccgccaagttcccgttggactcgctgcagccggggagcgctgctgcgatgatgctcgccggggctgctgccgcttcgcaggccaccatgccgccgtccgagaaggactactggtctctgctcgccctgcactaccagcagcagcaggagcaggagcggcagttcccggcttctgcttacgaggcttacggctccggcggcgtgaacgtggacttcacgatgggcaccagtagcggcaacaacaacaacaacaccggcagcggcgtcatgtggggcgccaccactggtgcagtagtagtgggacagcaagacagcagcggcaagcagggcaacggctatgccagcaacattccttatgctgctgctgctgctatggtttctggatctgctggctacgagggctccaccggcgacaatggaacctgggttactacgactattaccagcagcaacaccggcacggctccccactactacaactatctcttcgggatggagtag

SEQ ID NO: 212 - protein, 260 aa, Artificial Sequence; identical to SEQ ID NO: 202
  PLT3-17207

SEQ ID NO: 213 - protein, 494 aa, Artificial Sequence
  ZmPLTS
MDTSHHYHPWLNFSLAHHCDLEEEERGAAAELAAIAGAAPPPKLEDFLGGGVATGGPEAVAPAEMYDSDLKFIAAAGFLGGSAAAAATSPLSSLDQAGSKLALPAAAAAPAPEQRKAVDSFGQRTSIYRGVTRHRWTGRYEAHLWDNSCRREGQSRKGRQVYLGGYDKEEKAARAYDLAALKYWGSSTTTNFPVAEYEKEVEEMKNMTRQEFVASLRRKSSGFSRGASIYRGVTRHHQHGRWQARIGRVAGNKDLYLGTFSTEEEAAEAYDIAAIKFRGLNAVTNFEISRYNVETIMSSNLPVASMSSSSAAAAGGRSSKALESPPSGSLDGGGGMPVVEGSTAPPLFIPVKYDQQQQEYLSMLALQHHHQQQQAGNLLQGPLVGFGGLYSSGVNLDFANSHGTAAPSSMAHHCYANGTASASHEHQHQHQMQQGGENETQPQPQQSSSSCSSLPFATPVAFNGSYESSITAAGPFGYSYPNVAAFQTPIYGME

SEQ ID NO: 214 - protein, 489 aa, Artificial Sequence
  ZmPLT7
MDMDMSSAYPHHWLSFSLSNNYHHGLLEAFSNSSGTPLGDEPGAVEESPRTVEDFLGGVGGAGAPPQPAAAADQDHQLVCGELGSITARFLRHYPAAPAGTTVENPGAVTVAAMSSTDVAGAESDQARRPAETFGQRTSIYRGVTRHRWTGRYEAHLWDNSCRREGQSRKGRQVYLGGYDKEEKAARAYDLAALKYWGPTTTTNFPVSNYEKELEEMKSMTRQEFIASLRRKSSGFSRGASIYRGVTRHHQHGRWQARIGRVAGNKDLYLGTFSTQEEAAEAYDIAAIKFRGLNAVTNFDMSRYDVESILSSDLPVGGGATGRAAKFPLDSLQPGSAAAMMLAGAAAASQATMPPSEKDYWSLLALHYQQQQEQERQFPASAYEAYGSGGVNVDFTMGTSSGNNNNNTGSGVMWGATTGAVVVGQQDSSGKQGNGYASNIPYAAAAAMVSGSAGYEGSTGDNGTWVTTTITSSNTGTAPHYYNYLFGME

1. A method for targeted genome modification in a eukaryotic cell, preferably for increasing targeted insertion of a DNA insert at at least one target genomic sequence in a eukaryotic cell, comprising or consisting of the steps:
a) providing at least one eukaryotic cell to be modified;
b) promoting DNA polymerase theta (Pol θ) activity in said cell, wherein the promotion of Pol θ activity increases the DNA insertion efficiency during genome modification;
c) introducing into the at least one eukaryotic cell
(i) at least one genome modification system, preferably a genome editing system comprising at least one site-directed nuclease, nickase or an inactivated nuclease, preferably a nucleic acid guided nuclease, nickase or an inactivated nuclease, or a sequence encoding the same, and optionally at least one guide molecule, or a sequence encoding the same and
(ii) at least one single-stranded or double-stranded DNA insert, or a sequence encoding the same;
d) cultivating the at least one eukaryotic cell under conditions allowing
(i) the promotion of DNA polymerase Pol θ (Pol θ) activity; and
(ii) the activity of the at least one genome editing system and the at least one DNA insert and optionally the at least one guide molecule; and
e) obtaining at least one modified cell comprising the sequence of the DNA insert integrated at or close to the target genomic site; and
f) optionally: obtaining a eukaryotic organism, plant tissue, organ or seed regenerated from the at least one modified cell.

2. The method according to claim 1, wherein promoting of Pol θ is performed by enhancing the cellular level of polymerase Pol θ, or of at least one functional domain thereof.

3. The method according to claim 1, wherein the DNA polymerase Pol θ sequence, or the POLQ sequence encoding the same, is selected from the group consisting of SEQ ID NO: 1 to SEQ ID NO: 26, or a sequence, including a functional domain, having at least at least 70%, 71%, 72%, 73%, 74%, 75%, 76%, 77%, 78%, 79%, 80%, 81%, 82%, 83%, 84%, 85%, 86%, 87%, 88%, 89%, 90%, 91%, 92%, 93%, 94%, 95%, 96%, 97%, 98% or 99% sequence identity thereto.

4. The method according to claim 1, wherein the activity of DNA polymerase Pol θ, or of at least one functional domain thereof, is further promoted by modulating, preferably silencing, components of at least one competing DNA repair pathway, wherein the component belongs to the NHEJ or HDR repair pathway, or the sequence encoding the same, is selected from the group consisting of SEQ ID NO: 27 to SEQ ID NO: 114, or a sequence having at least at least 70%, 71%, 72%, 73%, 74%, 75%, 76%, 77%, 78%, 79%, 80%, 81%, 82%, 83%, 84%, 85%, 86%, 87%, 88%, 89%, 90%, 91%, 92%, 93%, 94%, 95%, 96%, 97%, 98% or 99% sequence identity thereto.

5. The method according to claim 1, wherein the promotion of MMEJ/HMIEJ pathway is achieved by co-expressing and/or modulating at least one MRE11 and/or at least one PARP1 protein, wherein the MRE11 and/or PARP1 protein, or the sequence encoding the same, is selected from the group consisting of SEQ ID NO: 115 to SEQ ID NO: 162 or a sequence having at least at least 70%, 71%, 72%, 73%, 74%, 75%, 76%, 77%, 78%, 79%, 80%, 81%, 82%, 83%, 84%, 85%, 86%, 87%, 88%, 89%, 90%, 91%, 92%, 93%, 94%, 95%, 96%, 97%, 98% or 99% sequence identity thereto.

6. The method of claim 1, wherein at least one site-directed nuclease, nickase or inactivated nuclease, or a sequence encoding the same, is selected from the group consisting of a CRISPR/Cas system, preferably from a CRISPR/Cas12a or a CRISPR/Cas12b system, including a CRISPR/MAD7 system, a CRISPR/Cfp1 system, or a CRISPR/MAD2 system, from a CRISPR/Cas9 system, a CRISPR/CasX system, a CRISPR/CasY system, a CRISPR/Cas13 system, a CRISPR/Csm system, a zinc finger nuclease system, a transcription activator-like nuclease system, a meganuclease system, and any combination, variant, or catalytically active fragment thereof.

7. The method according to claim 1, wherein Pol θ activity, or the at least one functional domain thereof, promotes targeted genome modification by acting on an endogenous micro-homology mediated end joining (MMEJ) and/or a homology-mediated end-joining (HMEJ) pathway.

8. The method according to claim 1, wherein the eukaryotic cell is a plant cell and wherein the method additionally comprises a step g) of screening for at least one plant tissue, organ, plant or seed regenerated from the at least or modified cell in the TO and/or T1 generation carrying the DNA insert.

9. The method according to claim 1, wherein the at least one eukaryotic cell is selected from a plant cell, and a mammalian cell.

10. The method according to claim 1, wherein the at least one eukaryotic cell is a plant cell.

11. The method according to claim 10, wherein the plant cell is a plant cell selected from the group consisting of Hordeum, Sorghum, Saccharum, Zea, Setaria, Oryza, Triticum, Secale, Triticale, Malus, Brachypodium, Aegilops, Daucus, Beta, Eucalyptus, Nicotiana, Solanum, Coffea, Vitis, Erythrante, Genlisea, Cucumis, Marus, Arabidopsis, Crucihimalaya, Cardamine, Lepidium, Capsella, Olmarabidopsis, Arabis, Brassica, Eruca, Raphanus, Citrus, Jatropha, Populus, Medicago, Cicer, Cajanus, Phaseolus, Glycine, Gossypium, Astragalus, Lotus, Torenia, Allium, Spinacia and Helianthus, preferably, the plant or plant cell originates from a species selected from the group consisting of Hordeum vulgare, Hordeum bulbusom, Sorghum bicolor, Saccharum officinarium, Zea spp., including Zea mays, Setaria italica, Oryza minuta, Oryza sativa, Oryza australiensis, Oryza alta, Triticum aestivum, Triticum durum, Secale cereale, Triticale, Malus domestica, Brachypodium distachyon, Hordeum marinum, Aegilops tauschii, Daucus glochidiatus, Beta spp., including Beta vulgaris, Daucus pusillus, Daucus muricatus, Daucus carota, Eucalyptus grandis, Nicotiana sylvestris, Nicotiana tomentosiformis, Nicotiana tabacum, Nicotiana benthamiana, Solanum lycopersicum, Solanum tuberosum, Coffea canephora, Vitis vinfera, Erythrante guttata, Genlisea aurea, Cucumis sativus, Marus notabilis, Arabidopsis arenosa, Arabidopsis lyrata, Arabidopsis thaliana, Crucihimalaya himalaica, Crucihimalaya wallichii, Cardamine nexuosa, Lepidium virginicum, Capsella bursa pastoris, Olmarabidopsis pumila, Arabis hirsute, Brassica napus, Brassica oleracea, Brassica rapa, Raphanus sativus, Brassica juncacea, Brassica nigra, Eruca vesicaria subsp. sativa, Citrus sinensis, Jatropha curcas, Populus trichocarpa, Medicago truncatula, Cicer yamashitae, Cicer bijugum, Cicer arietinum, Cicer reticulatum, Cicer judaicum, Cajanus cajanfolius, Cajanus scarabaeoides, Phaseolus vulgaris, Glycine max, Gossypium sp., Astragalus sinicus, Lotus japonicas, Torenia fournieri, Allium cepa, Allium fistulosum, Allium sativum, Allium tuberosum, Helianthus annuus, Helianthus tuberosus and Spinacia oleracea.

12. The method according to claim 1, wherein the method additionally comprises the step of introducing or applying at least one regeneration booster, or a sequence encoding the same, or a regeneration booster chemical.

13. The method according to claim 12, wherein the regeneration booster is selected from the group consisting of BBM, WUS, WOX, RKD4, RKD2, GRF, LEC, and variants thereof, or a sequence encoding the same.

14. The method according to claim 12, wherein the regeneration booster comprises at least one of an RBP and/or at least one PLT, preferably wherein the regeneration booster comprises at least one of an RBP, wherein the at least one regeneration booster sequence is individually selected from any one of SEQ ID NOs: 171, 195 to 201, and 209 to 211 or a sequence having at least 80%, 81%, 82%, 83%, 84%, 85%, 86%, 87%, 88%, 89%, 90%, 91%, 92%, 93%, 94%, 95%, 96%, 97%, 98% or 99% sequence identity thereto, or an active fragment thereof, or wherein the at least one regeneration booster sequence is encoded by a sequence individually selected from any one of SEQ ID NO: 172, 202 to 208, and 212 to 214 or a sequence having at least 70%, 71%, 72%, 73%, 74%, 75%, 76%, 77%, 78%, 79%, 80%, 81%, 82%, 83%, 84%, 85%, 86%, 87%, 88%, 89%, 90%, 91%, 92%, 93%, 94%, 95%, 96%, 97%, 98% or 99% sequence identity thereto.

15. The method according to claim 14, wherein at least one first RBP or PLT, or a sequence encoding the same, preferably at least one RBP, most preferably RBP2, or the sequence encoding the same, is provided and wherein at least one further regeneration booster is provided selected from:
(i) at least one further RBP and/or PLT, or the sequence encoding the same, or a variant thereof,
(ii) at least one BBM, or the sequence encoding the same, or a variant thereof,
(iii) at least one WOX, including WUS1, WUS2, or WOX5, or the sequence encoding the same, or a variant thereof,
(iv) at least one RKD4 or RKD2, including wheat RKD4, or the sequence encoding the same, or a variant thereof,
(v) at least one GRF, including Zea mays GRF5 and Zea mays GRF1/TOW, or the sequence encoding the same, or a variant thereof, and/or
(vi) at least one LEC sequence, including LEC1 and LEC2, or the sequence encoding the same, or a variant thereof,
and wherein the at least one second regeneration booster, or a sequence encoding the same, is different to the first regeneration booster.

16. A genetically modified cell, tissue, organ, or material, including a seed, obtainable by a method according to claim 1.

17. The genetically modified cell according to claim 14, wherein the cell, tissue, organ, or material, including a seed, is a plant cell, tissue, organ, or material, including a seed.

18. An expression construct assembly, comprising:
(i) at least one vector encoding at least one Pol θ sequence, or at least one functional domain thereof, and optionally comprising a construct encoding silencing components of at least one MMEJ/HMEJ competing repair pathway, and optionally a protein promoting the MMEJ/HMEJ pathway, and
(ii) at least one vector encoding a gene encoding at least one genome editing system, preferably wherein the genome editing system is as defined in claim 1, optionally comprising at least one vector encoding at least one guide molecule as defined in claim 1; and
(iii) at least one vector encoding at least one DNA insert, or at least one single-stranded or double-stranded DNA insert as defined in claim 1; and
(iv) optionally: at least one vector encoding at least one regeneration booster, preferably wherein the regeneration booster comprises (a) BBM, WUS, WOX, RKD4, RKD2, GRF, LEC, and variants thereof, or a sequence encoding the same, or (b) at least one of an RBP and/or at least one PLT, preferably wherein the regeneration booster comprises at least one of an RBP, wherein the at least one regeneration booster sequence is individually selected from any one of SEQ ID NOs: 171, 195 to 201, and 209 to 211 or a sequence having at least 80%, 81%, 82%, 83%, 84%, 85%, 86%, 87%, 88%, 89%, 90%, 91%, 92%, 93%, 94%, 95%, 96%, 97%, 98% or 99% sequence identity thereto, or an active fragment thereof, or wherein the at least one regeneration booster sequence is encoded by a sequence individually selected from any one of SEQ ID NO: 172, 202 to 208, and 212 to 214 or a sequence having at least 70%, 71%, 72%, 73%, 74%, 75%, 76%, 77%, 78%, 79%, 80%, 81%, 82%, 83%, 84%, 85%, 86%, 87%, 88%, 89%, 90%, 91%, 92%, 93%, 94%, 95%, 96%, 97%, 98% or 99% sequence identity thereto;
wherein (i), (ii), (iii), and/or (iv) are encoded on the same, or on different vectors,
wherein the DNA polymerase Pol θ sequence, or the POLQ sequence encoding the same, is selected from the group consisting of SEQ ID NO: 1 to SEQ ID NO: 26, or a sequence, including a functional domain, having at least at least 70%, 71%, 72%, 73%, 74%, 75%, 76%, 77%, 78%, 79%, 80%, 81%, 82%, 83%, 84%, 85%, 86%, 87%, 88%, 89%, 90%, 91%, 92%, 93%, 94%, 95%, 96%, 97%, 98% or 99% sequence identity thereto,
wherein the construct encoding silencing components of at least one MMEJ/HMEJ competing repair pathway, belongs to the NHEJ or HDR repair pathway, and the construct or the sequence encoding the same, is selected from the group consisting of SEQ ID NO: 27 to SEQ ID NO: 114, or a sequence having at least at least 70%, 71%, 72%, 73%, 74%, 75%, 76%, 77%, 78%, 79%, 80%, 81%, 82%, 83%, 84%, 85%, 86%, 87%, 88%, 89%, 90%, 91%, 92%, 93%, 94%, 95%, 96%, 97%, 98% or 99% sequence identity thereto, and
wherein the protein promoting the MMEJ/HMEJ pathway, or the sequence encoding the same, is selected from the group consisting of SEQ ID NO: 115 to SEQ ID NO: 162 or a sequence having at least at least 70%, 71%, 72%, 73%, 74%, 75%, 76%, 77%, 78%, 79%, 80%, 81%, 82%, 83%, 84%, 85%, 86%, 87%, 88%, 89%, 90%, 91%, 92%, 93%, 94%, 95%, 96%, 97%, 98% or 99% sequence identity thereto.

19. The expression construct assembly according to claim 18, wherein at least one vector of the assembly further comprises a nucleic acid sequence encoding at least one marker.

20. The expression construct assembly according to claim 18, wherein the expression construct assembly comprises at least one construct or sequence individually selected from any one of SEQ ID NOs: 163 to 165, 170, 173 to 175, and 179 to 183, 185, 187 and 189.
